United States Patent Application Publication US 2025/0333808 A1 - sequence listing, part 12

SEQ ID NO: 209602 - DNA, 80 bp, synthetic construct; identical to SEQ ID NO: 24872
  source 1..80: mol_type = other DNA

SEQ ID NO: 209603 - DNA, 80 bp, synthetic construct; identical to SEQ ID NO: 24873
  source 1..80: mol_type = other DNA

SEQ ID NO: 209604 - DNA, 80 bp, synthetic construct; identical to SEQ ID NO: 24874
  source 1..80: mol_type = other DNA

SEQ ID NO: 209605 - DNA, 80 bp, synthetic construct; identical to SEQ ID NO: 24875
  source 1..80: mol_type = other DNA

SEQ ID NO: 209606 - DNA, 80 bp, synthetic construct; identical to SEQ ID NO: 24876
  source 1..80: mol_type = other DNA

SEQ ID NO: 209607 - DNA, 80 bp, synthetic construct; identical to SEQ ID NO: 24877
  source 1..80: mol_type = other DNA

SEQ ID NO: 209608 - DNA, 80 bp, synthetic construct; identical to SEQ ID NO: 24878
  source 1..80: mol_type = other DNA

SEQ ID NO: 209609 - DNA, 80 bp, synthetic construct; identical to SEQ ID NO: 24879
  source 1..80: mol_type = other DNA

SEQ ID NO: 209610 - DNA, 80 bp, synthetic construct; identical to SEQ ID NO: 24880
  source 1..80: mol_type = other DNA

SEQ ID NO: 209611 - DNA, 80 bp, synthetic construct; identical to SEQ ID NO: 24881
  source 1..80: mol_type = other DNA

SEQ ID NO: 209612 - DNA, 80 bp, synthetic construct; identical to SEQ ID NO: 24882
  source 1..80: mol_type = other DNA

SEQ ID NO: 209613 - DNA, 80 bp, synthetic construct; identical to SEQ ID NO: 24883
  source 1..80: mol_type = other DNA

SEQ ID NO: 209614 - DNA, 80 bp, synthetic construct; identical to SEQ ID NO: 24884
  source 1..80: mol_type = other DNA

SEQ ID NO: 209615 - DNA, 80 bp, synthetic construct; identical to SEQ ID NO: 24885
  source 1..80: mol_type = other DNA

SEQ ID NO: 209616 - DNA, 80 bp, synthetic construct; identical to SEQ ID NO: 24886
  source 1..80: mol_type = other DNA

SEQ ID NO: 209617 - DNA, 80 bp, synthetic construct; identical to SEQ ID NO: 24887
  source 1..80: mol_type = other DNA

SEQ ID NO: 209618 - DNA, 80 bp, synthetic construct; identical to SEQ ID NO: 24888
  source 1..80: mol_type = other DNA

SEQ ID NO: 209619 - DNA, 80 bp, synthetic construct; identical to SEQ ID NO: 24889
  source 1..80: mol_type = other DNA

SEQ ID NO: 209620 - DNA, 80 bp, synthetic construct; identical to SEQ ID NO: 24890
  source 1..80: mol_type = other DNA

SEQ ID NO: 209621 - DNA, 80 bp, synthetic construct; identical to SEQ ID NO: 24891
  source 1..80: mol_type = other DNA

SEQ ID NO: 209622 - DNA, 80 bp, synthetic construct; identical to SEQ ID NO: 24892
  source 1..80: mol_type = other DNA

SEQ ID NO: 209623 - DNA, 80 bp, synthetic construct; identical to SEQ ID NO: 24893
  source 1..80: mol_type = other DNA

SEQ ID NO: 209624 - DNA, 80 bp, synthetic construct; identical to SEQ ID NO: 24894
  source 1..80: mol_type = other DNA

SEQ ID NO: 209625 - DNA, 80 bp, synthetic construct; identical to SEQ ID NO: 24895
  source 1..80: mol_type = other DNA

SEQ ID NO: 209626 - DNA, 80 bp, synthetic construct; identical to SEQ ID NO: 24896
  source 1..80: mol_type = other DNA

SEQ ID NO: 209627 - DNA, 80 bp, synthetic construct; identical to SEQ ID NO: 24897
  source 1..80: mol_type = other DNA

SEQ ID NO: 209628 - DNA, 80 bp, synthetic construct; identical to SEQ ID NO: 24898
  source 1..80: mol_type = other DNA

SEQ ID NO: 209629 - DNA, 80 bp, synthetic construct; identical to SEQ ID NO: 24899
  source 1..80: mol_type = other DNA

SEQ ID NO: 209630 - DNA, 80 bp, synthetic construct; identical to SEQ ID NO: 24900
  source 1..80: mol_type = other DNA

SEQ ID NO: 209631 - DNA, 80 bp, synthetic construct; identical to SEQ ID NO: 24901
  source 1..80: mol_type = other DNA

SEQ ID NO: 209632 - DNA, 80 bp, synthetic construct; identical to SEQ ID NO: 24902
  source 1..80: mol_type = other DNA

SEQ ID NO: 209633 - DNA, 80 bp, synthetic construct; identical to SEQ ID NO: 24903
  source 1..80: mol_type = other DNA

SEQ ID NO: 209634 - DNA, 80 bp, synthetic construct; identical to SEQ ID NO: 24904
  source 1..80: mol_type = other DNA

SEQ ID NO: 209635 - DNA, 80 bp, synthetic construct; identical to SEQ ID NO: 24905
  source 1..80: mol_type = other DNA

SEQ ID NO: 209636 - DNA, 80 bp, synthetic construct; identical to SEQ ID NO: 24906
  source 1..80: mol_type = other DNA

SEQ ID NO: 209637 - DNA, 80 bp, synthetic construct; identical to SEQ ID NO: 24907
  source 1..80: mol_type = other DNA

SEQ ID NO: 209638 - DNA, 80 bp, synthetic construct; identical to SEQ ID NO: 24908
  source 1..80: mol_type = other DNA

SEQ ID NO: 209639 - DNA, 80 bp, synthetic construct; identical to SEQ ID NO: 24909
  source 1..80: mol_type = other DNA

SEQ ID NO: 209640 - DNA, 80 bp, synthetic construct; identical to SEQ ID NO: 24910
  source 1..80: mol_type = other DNA

SEQ ID NO: 209641 - DNA, 80 bp, synthetic construct; identical to SEQ ID NO: 24911
  source 1..80: mol_type = other DNA

SEQ ID NO: 209642 - DNA, 80 bp, synthetic construct; identical to SEQ ID NO: 24912
  source 1..80: mol_type = other DNA

SEQ ID NO: 209643 - DNA, 80 bp, synthetic construct; identical to SEQ ID NO: 24913
  source 1..80: mol_type = other DNA

SEQ ID NO: 209644 - DNA, 80 bp, synthetic construct; identical to SEQ ID NO: 24914
  source 1..80: mol_type = other DNA

SEQ ID NO: 209645 - DNA, 80 bp, synthetic construct; identical to SEQ ID NO: 24915
  source 1..80: mol_type = other DNA

SEQ ID NO: 209646 - DNA, 80 bp, synthetic construct; identical to SEQ ID NO: 24916
  source 1..80: mol_type = other DNA

SEQ ID NO: 209647 - DNA, 80 bp, synthetic construct; identical to SEQ ID NO: 24917
  source 1..80: mol_type = other DNA

SEQ ID NO: 209648 - DNA, 80 bp, synthetic construct; identical to SEQ ID NO: 24918
  source 1..80: mol_type = other DNA

SEQ ID NO: 209649 - DNA, 80 bp, synthetic construct; identical to SEQ ID NO: 24919
  source 1..80: mol_type = other DNA

SEQ ID NO: 209650 - DNA, 80 bp, synthetic construct; identical to SEQ ID NO: 24920
  source 1..80: mol_type = other DNA

SEQ ID NO: 209651 - DNA, 80 bp, synthetic construct; identical to SEQ ID NO: 24921
  source 1..80: mol_type = other DNA

SEQ ID NO: 209652 - DNA, 80 bp, synthetic construct; identical to SEQ ID NO: 24922
  source 1..80: mol_type = other DNA

SEQ ID NO: 209653 - DNA, 80 bp, synthetic construct; identical to SEQ ID NO: 24923
  source 1..80: mol_type = other DNA

SEQ ID NO: 209654 - DNA, 80 bp, synthetic construct; identical to SEQ ID NO: 24924
  source 1..80: mol_type = other DNA

SEQ ID NO: 209655 - DNA, 80 bp, synthetic construct; identical to SEQ ID NO: 24925
  source 1..80: mol_type = other DNA

SEQ ID NO: 209656 - DNA, 80 bp, synthetic construct; identical to SEQ ID NO: 24926
  source 1..80: mol_type = other DNA

SEQ ID NO: 209657 - DNA, 80 bp, synthetic construct; identical to SEQ ID NO: 24927
  source 1..80: mol_type = other DNA

SEQ ID NO: 209658 - DNA, 80 bp, synthetic construct; identical to SEQ ID NO: 24928
  source 1..80: mol_type = other DNA

SEQ ID NO: 209659 - DNA, 80 bp, synthetic construct; identical to SEQ ID NO: 24929
  source 1..80: mol_type = other DNA

SEQ ID NO: 209660 - DNA, 80 bp, synthetic construct; identical to SEQ ID NO: 24930
  source 1..80: mol_type = other DNA

SEQ ID NO: 209661 - DNA, 80 bp, synthetic construct; identical to SEQ ID NO: 24931
  source 1..80: mol_type = other DNA

SEQ ID NO: 209662 - DNA, 80 bp, synthetic construct; identical to SEQ ID NO: 24932
  source 1..80: mol_type = other DNA

SEQ ID NO: 209663 - DNA, 80 bp, synthetic construct; identical to SEQ ID NO: 24933
  source 1..80: mol_type = other DNA

SEQ ID NO: 209664 - DNA, 80 bp, synthetic construct; identical to SEQ ID NO: 24934
  source 1..80: mol_type = other DNA

SEQ ID NO: 209665 - DNA, 80 bp, synthetic construct; identical to SEQ ID NO: 24935
  source 1..80: mol_type = other DNA

SEQ ID NO: 209666 - DNA, 80 bp, synthetic construct; identical to SEQ ID NO: 24936
  source 1..80: mol_type = other DNA

SEQ ID NO: 209667 - DNA, 80 bp, synthetic construct; identical to SEQ ID NO: 24937
  source 1..80: mol_type = other DNA

SEQ ID NO: 209668 - DNA, 80 bp, synthetic construct; identical to SEQ ID NO: 24938
  source 1..80: mol_type = other DNA

SEQ ID NO: 209669 - DNA, 80 bp, synthetic construct; identical to SEQ ID NO: 24939
  source 1..80: mol_type = other DNA

SEQ ID NO: 209670 - DNA, 80 bp, synthetic construct; identical to SEQ ID NO: 24940
  source 1..80: mol_type = other DNA

SEQ ID NO: 209671 - DNA, 80 bp, synthetic construct; identical to SEQ ID NO: 24941
  source 1..80: mol_type = other DNA

SEQ ID NO: 209672 - DNA, 80 bp, synthetic construct; identical to SEQ ID NO: 24942
  source 1..80: mol_type = other DNA

SEQ ID NO: 209673 - DNA, 80 bp, synthetic construct; identical to SEQ ID NO: 24943
  source 1..80: mol_type = other DNA

SEQ ID NO: 209674 - DNA, 80 bp, synthetic construct; identical to SEQ ID NO: 24944
  source 1..80: mol_type = other DNA

SEQ ID NO: 209675 - DNA, 80 bp, synthetic construct; identical to SEQ ID NO: 24945
  source 1..80: mol_type = other DNA

SEQ ID NO: 209676 - DNA, 80 bp, synthetic construct; identical to SEQ ID NO: 24946
  source 1..80: mol_type = other DNA

SEQ ID NO: 209677 - DNA, 80 bp, synthetic construct; identical to SEQ ID NO: 24947
  source 1..80: mol_type = other DNA

SEQ ID NO: 209678 - DNA, 80 bp, synthetic construct; identical to SEQ ID NO: 24948
  source 1..80: mol_type = other DNA

SEQ ID NO: 209679 - DNA, 80 bp, synthetic construct; identical to SEQ ID NO: 24949
  source 1..80: mol_type = other DNA

SEQ ID NO: 209680 - DNA, 80 bp, synthetic construct; identical to SEQ ID NO: 24950
  source 1..80: mol_type = other DNA

SEQ ID NO: 209681 - DNA, 80 bp, synthetic construct; identical to SEQ ID NO: 24951
  source 1..80: mol_type = other DNA

SEQ ID NO: 209682 - DNA, 80 bp, synthetic construct; identical to SEQ ID NO: 24952
  source 1..80: mol_type = other DNA

SEQ ID NO: 209683 - DNA, 80 bp, synthetic construct; identical to SEQ ID NO: 24953
  source 1..80: mol_type = other DNA

SEQ ID NO: 209684 - DNA, 80 bp, synthetic construct; identical to SEQ ID NO: 24954
  source 1..80: mol_type = other DNA

SEQ ID NO: 209685 - DNA, 80 bp, synthetic construct; identical to SEQ ID NO: 24955
  source 1..80: mol_type = other DNA

SEQ ID NO: 209686 - DNA, 80 bp, synthetic construct; identical to SEQ ID NO: 24956
  source 1..80: mol_type = other DNA

SEQ ID NO: 209687 - DNA, 80 bp, synthetic construct; identical to SEQ ID NO: 24957
  source 1..80: mol_type = other DNA

SEQ ID NO: 209688 - DNA, 80 bp, synthetic construct; identical to SEQ ID NO: 24958
  source 1..80: mol_type = other DNA

SEQ ID NO: 209689 - DNA, 80 bp, synthetic construct; identical to SEQ ID NO: 24959
  source 1..80: mol_type = other DNA

SEQ ID NO: 209690 - DNA, 80 bp, synthetic construct; identical to SEQ ID NO: 24960
  source 1..80: mol_type = other DNA

SEQ ID NO: 209691 - DNA, 80 bp, synthetic construct; identical to SEQ ID NO: 24961
  source 1..80: mol_type = other DNA

SEQ ID NO: 209692 - DNA, 80 bp, synthetic construct; identical to SEQ ID NO: 24962
  source 1..80: mol_type = other DNA

SEQ ID NO: 209693 - DNA, 80 bp, synthetic construct; identical to SEQ ID NO: 24963
  source 1..80: mol_type = other DNA

SEQ ID NO: 209694 - DNA, 80 bp, synthetic construct; identical to SEQ ID NO: 24964
  source 1..80: mol_type = other DNA

SEQ ID NO: 209695 - DNA, 80 bp, synthetic construct; identical to SEQ ID NO: 24965
  source 1..80: mol_type = other DNA

SEQ ID NO: 209696 - DNA, 80 bp, synthetic construct; identical to SEQ ID NO: 24966
  source 1..80: mol_type = other DNA

SEQ ID NO: 209697 - DNA, 80 bp, synthetic construct; identical to SEQ ID NO: 24967
  source 1..80: mol_type = other DNA

SEQ ID NO: 209698 - DNA, 80 bp, synthetic construct; identical to SEQ ID NO: 24968
  source 1..80: mol_type = other DNA

SEQ ID NO: 209699 - DNA, 80 bp, synthetic construct; identical to SEQ ID NO: 24969
  source 1..80: mol_type = other DNA

SEQ ID NO: 209700 - DNA, 80 bp, synthetic construct; identical to SEQ ID NO: 24970
  source 1..80: mol_type = other DNA

SEQ ID NO: 209701 - DNA, 80 bp, synthetic construct; identical to SEQ ID NO: 24971
  source 1..80: mol_type = other DNA

SEQ ID NO: 209702 - DNA, 80 bp, synthetic construct; identical to SEQ ID NO: 24972
  source 1..80: mol_type = other DNA

SEQ ID NO: 209703 - DNA, 80 bp, synthetic construct; identical to SEQ ID NO: 24973
  source 1..80: mol_type = other DNA

SEQ ID NO: 209704 - DNA, 80 bp, synthetic construct; identical to SEQ ID NO: 24974
  source 1..80: mol_type = other DNA

SEQ ID NO: 209705 - DNA, 80 bp, synthetic construct; identical to SEQ ID NO: 24975
  source 1..80: mol_type = other DNA

SEQ ID NO: 209706 - DNA, 80 bp, synthetic construct; identical to SEQ ID NO: 24976
  source 1..80: mol_type = other DNA

SEQ ID NO: 209707 - DNA, 80 bp, synthetic construct; identical to SEQ ID NO: 24977
  source 1..80: mol_type = other DNA

SEQ ID NO: 209708 - DNA, 80 bp, synthetic construct; identical to SEQ ID NO: 24978
  source 1..80: mol_type = other DNA

SEQ ID NO: 209709 - DNA, 80 bp, synthetic construct; identical to SEQ ID NO: 24979
  source 1..80: mol_type = other DNA

SEQ ID NO: 209710 - DNA, 80 bp, synthetic construct; identical to SEQ ID NO: 24980
  source 1..80: mol_type = other DNA

SEQ ID NO: 209711 - DNA, 80 bp, synthetic construct; identical to SEQ ID NO: 24981
  source 1..80: mol_type = other DNA

SEQ ID NO: 209712 - DNA, 80 bp, synthetic construct; identical to SEQ ID NO: 24982
  source 1..80: mol_type = other DNA

SEQ ID NO: 209713 - DNA, 80 bp, synthetic construct; identical to SEQ ID NO: 24983
  source 1..80: mol_type = other DNA

SEQ ID NO: 209714 - DNA, 80 bp, synthetic construct; identical to SEQ ID NO: 24984
  source 1..80: mol_type = other DNA

SEQ ID NO: 209715 - DNA, 80 bp, synthetic construct; identical to SEQ ID NO: 24985
  source 1..80: mol_type = other DNA

SEQ ID NO: 209716 - DNA, 80 bp, synthetic construct; identical to SEQ ID NO: 24986
  source 1..80: mol_type = other DNA

SEQ ID NO: 209717 - DNA, 80 bp, synthetic construct; identical to SEQ ID NO: 24987
  source 1..80: mol_type = other DNA

SEQ ID NO: 209718 - DNA, 80 bp, synthetic construct; identical to SEQ ID NO: 24988
  source 1..80: mol_type = other DNA

SEQ ID NO: 209719 - DNA, 80 bp, synthetic construct; identical to SEQ ID NO: 24989
  source 1..80: mol_type = other DNA

SEQ ID NO: 209720 - DNA, 80 bp, synthetic construct; identical to SEQ ID NO: 24990
  source 1..80: mol_type = other DNA

SEQ ID NO: 209721 - DNA, 80 bp, synthetic construct; identical to SEQ ID NO: 24991
  source 1..80: mol_type = other DNA

SEQ ID NO: 209722 - DNA, 80 bp, synthetic construct; identical to SEQ ID NO: 24992
  source 1..80: mol_type = other DNA

SEQ ID NO: 209723 - DNA, 80 bp, synthetic construct; identical to SEQ ID NO: 24993
  source 1..80: mol_type = other DNA

SEQ ID NO: 209724 - DNA, 80 bp, synthetic construct; identical to SEQ ID NO: 24994
  source 1..80: mol_type = other DNA

SEQ ID NO: 209725 - DNA, 80 bp, synthetic construct; identical to SEQ ID NO: 24995
  source 1..80: mol_type = other DNA

SEQ ID NO: 209726 - DNA, 80 bp, synthetic construct; identical to SEQ ID NO: 24996
  source 1..80: mol_type = other DNA

SEQ ID NO: 209727 - DNA, 80 bp, synthetic construct; identical to SEQ ID NO: 24997
  source 1..80: mol_type = other DNA

SEQ ID NO: 209728 - DNA, 80 bp, synthetic construct; identical to SEQ ID NO: 24998
  source 1..80: mol_type = other DNA

SEQ ID NO: 209729 - DNA, 80 bp, synthetic construct; identical to SEQ ID NO: 24999
  source 1..80: mol_type = other DNA

SEQ ID NO: 209730 - DNA, 80 bp, synthetic construct; identical to SEQ ID NO: 25000
  source 1..80: mol_type = other DNA

SEQ ID NO: 209731 - DNA, 80 bp, synthetic construct; identical to SEQ ID NO: 25001
  source 1..80: mol_type = other DNA

SEQ ID NO: 209732 - DNA, 80 bp, synthetic construct; identical to SEQ ID NO: 25002
  source 1..80: mol_type = other DNA

SEQ ID NO: 209733 - DNA, 80 bp, synthetic construct; identical to SEQ ID NO: 25003
  source 1..80: mol_type = other DNA

SEQ ID NO: 209734 - DNA, 80 bp, synthetic construct; identical to SEQ ID NO: 25004
  source 1..80: mol_type = other DNA

SEQ ID NO: 209735 - DNA, 80 bp, synthetic construct; identical to SEQ ID NO: 25005
  source 1..80: mol_type = other DNA

SEQ ID NO: 209736 - DNA, 80 bp, synthetic construct; identical to SEQ ID NO: 25006
  source 1..80: mol_type = other DNA

SEQ ID NO: 209737 - DNA, 80 bp, synthetic construct; identical to SEQ ID NO: 25007
  source 1..80: mol_type = other DNA

SEQ ID NO: 209738 - DNA, 80 bp, synthetic construct; identical to SEQ ID NO: 25008
  source 1..80: mol_type = other DNA

SEQ ID NO: 209739 - DNA, 80 bp, synthetic construct; identical to SEQ ID NO: 25009
  source 1..80: mol_type = other DNA

SEQ ID NO: 209740 - DNA, 80 bp, synthetic construct; identical to SEQ ID NO: 25010
  source 1..80: mol_type = other DNA

SEQ ID NO: 209741 - DNA, 80 bp, synthetic construct; identical to SEQ ID NO: 25011
  source 1..80: mol_type = other DNA

SEQ ID NO: 209742 - DNA, 80 bp, synthetic construct; identical to SEQ ID NO: 25012
  source 1..80: mol_type = other DNA

SEQ ID NO: 209743 - DNA, 80 bp, synthetic construct; identical to SEQ ID NO: 25013
  source 1..80: mol_type = other DNA

SEQ ID NO: 209744 - DNA, 80 bp, synthetic construct; identical to SEQ ID NO: 25014
  source 1..80: mol_type = other DNA

SEQ ID NO: 209745 - DNA, 80 bp, synthetic construct; identical to SEQ ID NO: 25015
  source 1..80: mol_type = other DNA

SEQ ID NO: 209746 - DNA, 80 bp, synthetic construct; identical to SEQ ID NO: 25016
  source 1..80: mol_type = other DNA

SEQ ID NO: 209747 - DNA, 80 bp, synthetic construct; identical to SEQ ID NO: 25017
  source 1..80: mol_type = other DNA

SEQ ID NO: 209748 - DNA, 80 bp, synthetic construct; identical to SEQ ID NO: 25018
  source 1..80: mol_type = other DNA

SEQ ID NO: 209749 - DNA, 80 bp, synthetic construct; identical to SEQ ID NO: 25019
  source 1..80: mol_type = other DNA

SEQ ID NO: 209750 - DNA, 80 bp, synthetic construct; identical to SEQ ID NO: 25020
  source 1..80: mol_type = other DNA

SEQ ID NO: 209751 - DNA, 80 bp, synthetic construct; identical to SEQ ID NO: 25021
  source 1..80: mol_type = other DNA

SEQ ID NO: 209752 - DNA, 80 bp, synthetic construct; identical to SEQ ID NO: 25022
  source 1..80: mol_type = other DNA

SEQ ID NO: 209753 - DNA, 80 bp, synthetic construct; identical to SEQ ID NO: 25023
  source 1..80: mol_type = other DNA

SEQ ID NO: 209754 - DNA, 80 bp, synthetic construct; identical to SEQ ID NO: 25024
  source 1..80: mol_type = other DNA

SEQ ID NO: 209755 - DNA, 80 bp, synthetic construct; identical to SEQ ID NO: 25025
  source 1..80: mol_type = other DNA

SEQ ID NO: 209756 - DNA, 80 bp, synthetic construct; identical to SEQ ID NO: 25026
  source 1..80: mol_type = other DNA

SEQ ID NO: 209757 - DNA, 80 bp, synthetic construct; identical to SEQ ID NO: 25027
  source 1..80: mol_type = other DNA

SEQ ID NO: 209758 - DNA, 80 bp, synthetic construct; identical to SEQ ID NO: 25028
  source 1..80: mol_type = other DNA

SEQ ID NO: 209759 - DNA, 80 bp, synthetic construct; identical to SEQ ID NO: 25029
  source 1..80: mol_type = other DNA

SEQ ID NO: 209760 - DNA, 80 bp, synthetic construct; identical to SEQ ID NO: 25030
  source 1..80: mol_type = other DNA

SEQ ID NO: 209761 - DNA, 80 bp, synthetic construct; identical to SEQ ID NO: 25031
  source 1..80: mol_type = other DNA

SEQ ID NO: 209762 - DNA, 80 bp, synthetic construct; identical to SEQ ID NO: 25032
  source 1..80: mol_type = other DNA

SEQ ID NO: 209763 - DNA, 80 bp, synthetic construct; identical to SEQ ID NO: 25033
  source 1..80: mol_type = other DNA

SEQ ID NO: 209764 - DNA, 80 bp, synthetic construct; identical to SEQ ID NO: 25034
  source 1..80: mol_type = other DNA

SEQ ID NO: 209765 - DNA, 80 bp, synthetic construct; identical to SEQ ID NO: 25035
  source 1..80: mol_type = other DNA

SEQ ID NO: 209766 - DNA, 80 bp, synthetic construct; identical to SEQ ID NO: 25036
  source 1..80: mol_type = other DNA

SEQ ID NO: 209767 - DNA, 80 bp, synthetic construct; identical to SEQ ID NO: 25037
  source 1..80: mol_type = other DNA

SEQ ID NO: 209768 - DNA, 80 bp, synthetic construct; identical to SEQ ID NO: 25038
  source 1..80: mol_type = other DNA

SEQ ID NO: 209769 - DNA, 80 bp, synthetic construct; identical to SEQ ID NO: 25039
  source 1..80: mol_type = other DNA

SEQ ID NO: 209770 - DNA, 80 bp, synthetic construct; identical to SEQ ID NO: 25040
  source 1..80: mol_type = other DNA

SEQ ID NO: 209771 - DNA, 80 bp, synthetic construct; identical to SEQ ID NO: 25041
  source 1..80: mol_type = other DNA

SEQ ID NO: 209772 - DNA, 80 bp, synthetic construct; identical to SEQ ID NO: 25042
  source 1..80: mol_type = other DNA

SEQ ID NO: 209773 - DNA, 80 bp, synthetic construct; identical to SEQ ID NO: 25043
  source 1..80: mol_type = other DNA

SEQ ID NO: 209774 - DNA, 80 bp, synthetic construct; identical to SEQ ID NO: 25044
  source 1..80: mol_type = other DNA

SEQ ID NO: 209775 - DNA, 80 bp, synthetic construct; identical to SEQ ID NO: 25045
  source 1..80: mol_type = other DNA

SEQ ID NO: 209776 - DNA, 80 bp, synthetic construct; identical to SEQ ID NO: 25046
  source 1..80: mol_type = other DNA

SEQ ID NO: 209777 - DNA, 80 bp, synthetic construct; identical to SEQ ID NO: 25047
  source 1..80: mol_type = other DNA

SEQ ID NO: 209778 - DNA, 80 bp, synthetic construct; identical to SEQ ID NO: 25048
  source 1..80: mol_type = other DNA

SEQ ID NO: 209779 - DNA, 80 bp, synthetic construct; identical to SEQ ID NO: 25049
  source 1..80: mol_type = other DNA

SEQ ID NO: 209780 - DNA, 80 bp, synthetic construct; identical to SEQ ID NO: 25050
  source 1..80: mol_type = other DNA

SEQ ID NO: 209781 - DNA, 80 bp, synthetic construct; identical to SEQ ID NO: 25051
  source 1..80: mol_type = other DNA

SEQ ID NO: 209782 - DNA, 80 bp, synthetic construct; identical to SEQ ID NO: 25052
  source 1..80: mol_type = other DNA

SEQ ID NO: 209783 - DNA, 80 bp, synthetic construct; identical to SEQ ID NO: 25053
  source 1..80: mol_type = other DNA

SEQ ID NO: 209784 - DNA, 80 bp, synthetic construct; identical to SEQ ID NO: 25054
  source 1..80: mol_type = other DNA

SEQ ID NO: 209785 - DNA, 80 bp, synthetic construct; identical to SEQ ID NO: 25055
  source 1..80: mol_type = other DNA

SEQ ID NO: 209786 - DNA, 80 bp, synthetic construct; identical to SEQ ID NO: 25056
  source 1..80: mol_type = other DNA

SEQ ID NO: 209787 - DNA, 80 bp, synthetic construct; identical to SEQ ID NO: 25057
  source 1..80: mol_type = other DNA

SEQ ID NO: 209788 - DNA, 80 bp, synthetic construct; identical to SEQ ID NO: 25058
  source 1..80: mol_type = other DNA

SEQ ID NO: 209789 - DNA, 80 bp, synthetic construct; identical to SEQ ID NO: 25059
  source 1..80: mol_type = other DNA

SEQ ID NO: 209790 - DNA, 80 bp, synthetic construct; identical to SEQ ID NO: 25060
  source 1..80: mol_type = other DNA

SEQ ID NO: 209791 - DNA, 80 bp, synthetic construct; identical to SEQ ID NO: 25061
  source 1..80: mol_type = other DNA

SEQ ID NO: 209792 - DNA, 80 bp, synthetic construct; identical to SEQ ID NO: 25062
  source 1..80: mol_type = other DNA

SEQ ID NO: 209793 - DNA, 80 bp, synthetic construct; identical to SEQ ID NO: 25063
  source 1..80: mol_type = other DNA

SEQ ID NO: 209794 - DNA, 80 bp, synthetic construct; identical to SEQ ID NO: 25064
  source 1..80: mol_type = other DNA

SEQ ID NO: 209795 - DNA, 80 bp, synthetic construct; identical to SEQ ID NO: 25065
  source 1..80: mol_type = other DNA

SEQ ID NO: 209796 - DNA, 80 bp, synthetic construct; identical to SEQ ID NO: 25066
  source 1..80: mol_type = other DNA

SEQ ID NO: 209797 - DNA, 80 bp, synthetic construct; identical to SEQ ID NO: 25067
  source 1..80: mol_type = other DNA

SEQ ID NO: 209798 - DNA, 80 bp, synthetic construct; identical to SEQ ID NO: 25068
  source 1..80: mol_type = other DNA

SEQ ID NO: 209799 - DNA, 80 bp, synthetic construct; identical to SEQ ID NO: 25069
  source 1..80: mol_type = other DNA

SEQ ID NO: 209800 - DNA, 80 bp, synthetic construct; identical to SEQ ID NO: 25070
  source 1..80: mol_type = other DNA

SEQ ID NO: 209801 - DNA, 80 bp, synthetic construct; identical to SEQ ID NO: 25071
  source 1..80: mol_type = other DNA

SEQ ID NO: 209802 - DNA, 80 bp, synthetic construct; identical to SEQ ID NO: 25072
  source 1..80: mol_type = other DNA

SEQ ID NO: 209803 - DNA, 80 bp, synthetic construct; identical to SEQ ID NO: 25073
  source 1..80: mol_type = other DNA

SEQ ID NO: 209804 - DNA, 80 bp, synthetic construct; identical to SEQ ID NO: 25074
  source 1..80: mol_type = other DNA

SEQ ID NO: 209805 - DNA, 80 bp, synthetic construct; identical to SEQ ID NO: 25075
  source 1..80: mol_type = other DNA

SEQ ID NO: 209806 - DNA, 80 bp, synthetic construct; identical to SEQ ID NO: 25076
  source 1..80: mol_type = other DNA

SEQ ID NO: 209807 - DNA, 80 bp, synthetic construct; identical to SEQ ID NO: 25077
  source 1..80: mol_type = other DNA

SEQ ID NO: 209808 - DNA, 80 bp, synthetic construct; identical to SEQ ID NO: 25078
  source 1..80: mol_type = other DNA

SEQ ID NO: 209809 - DNA, 80 bp, synthetic construct; identical to SEQ ID NO: 25079
  source 1..80: mol_type = other DNA

SEQ ID NO: 209810 - DNA, 80 bp, synthetic construct; identical to SEQ ID NO: 25080
  source 1..80: mol_type = other DNA

SEQ ID NO: 209811 - DNA, 80 bp, synthetic construct; identical to SEQ ID NO: 25081
  source 1..80: mol_type = other DNA

SEQ ID NO: 209812 - DNA, 80 bp, synthetic construct; identical to SEQ ID NO: 25082
  source 1..80: mol_type = other DNA

SEQ ID NO: 209813 - DNA, 80 bp, synthetic construct; identical to SEQ ID NO: 25083
  source 1..80: mol_type = other DNA

SEQ ID NO: 209814 - DNA, 80 bp, synthetic construct; identical to SEQ ID NO: 25084
  source 1..80: mol_type = other DNA

SEQ ID NO: 209815 - DNA, 80 bp, synthetic construct; identical to SEQ ID NO: 25085
  source 1..80: mol_type = other DNA

SEQ ID NO: 209816 - DNA, 80 bp, synthetic construct; identical to SEQ ID NO: 25086
  source 1..80: mol_type = other DNA

SEQ ID NO: 209817 - DNA, 80 bp, synthetic construct; identical to SEQ ID NO: 25087
  source 1..80: mol_type = other DNA

SEQ ID NO: 209818 - DNA, 80 bp, synthetic construct; identical to SEQ ID NO: 25088
  source 1..80: mol_type = other DNA

SEQ ID NO: 209819 - DNA, 80 bp, synthetic construct; identical to SEQ ID NO: 25089
  source 1..80: mol_type = other DNA

SEQ ID NO: 209820 - DNA, 80 bp, synthetic construct; identical to SEQ ID NO: 25090
  source 1..80: mol_type = other DNA

SEQ ID NO: 209821 - DNA, 80 bp, synthetic construct; identical to SEQ ID NO: 25091
  source 1..80: mol_type = other DNA

SEQ ID NO: 209822 - DNA, 80 bp, synthetic construct; identical to SEQ ID NO: 25092
  source 1..80: mol_type = other DNA

SEQ ID NO: 209823 - DNA, 80 bp, synthetic construct; identical to SEQ ID NO: 25093
  source 1..80: mol_type = other DNA

SEQ ID NO: 209824 - DNA, 80 bp, synthetic construct; identical to SEQ ID NO: 25094
  source 1..80: mol_type = other DNA

SEQ ID NO: 209825 - DNA, 80 bp, synthetic construct; identical to SEQ ID NO: 25095
  source 1..80: mol_type = other DNA

SEQ ID NO: 209826 - DNA, 80 bp, synthetic construct; identical to SEQ ID NO: 25096
  source 1..80: mol_type = other DNA

SEQ ID NO: 209827 - DNA, 80 bp, synthetic construct; identical to SEQ ID NO: 25097
  source 1..80: mol_type = other DNA

SEQ ID NO: 209828 - DNA, 80 bp, synthetic construct; identical to SEQ ID NO: 25098
  source 1..80: mol_type = other DNA

SEQ ID NO: 209829 - DNA, 80 bp, synthetic construct; identical to SEQ ID NO: 25099
  source 1..80: mol_type = other DNA

SEQ ID NO: 209830 - DNA, 80 bp, synthetic construct; identical to SEQ ID NO: 25100
  source 1..80: mol_type = other DNA

SEQ ID NO: 209831 - DNA, 80 bp, synthetic construct; identical to SEQ ID NO: 25101
  source 1..80: mol_type = other DNA

SEQ ID NO: 209832 - DNA, 80 bp, synthetic construct; identical to SEQ ID NO: 25102
  source 1..80: mol_type = other DNA

SEQ ID NO: 209833 - DNA, 80 bp, synthetic construct; identical to SEQ ID NO: 25103
  source 1..80: mol_type = other DNA

SEQ ID NO: 209834 - DNA, 80 bp, synthetic construct; identical to SEQ ID NO: 25104
  source 1..80: mol_type = other DNA

SEQ ID NO: 209835 - DNA, 80 bp, synthetic construct; identical to SEQ ID NO: 25105
  source 1..80: mol_type = other DNA

SEQ ID NO: 209836 - DNA, 80 bp, synthetic construct; identical to SEQ ID NO: 25106
  source 1..80: mol_type = other DNA

SEQ ID NO: 209837 - DNA, 80 bp, synthetic construct; identical to SEQ ID NO: 25107
  source 1..80: mol_type = other DNA

SEQ ID NO: 209838 - DNA, 80 bp, synthetic construct; identical to SEQ ID NO: 25108
  source 1..80: mol_type = other DNA

SEQ ID NO: 209839 - DNA, 80 bp, synthetic construct; identical to SEQ ID NO: 25109
  source 1..80: mol_type = other DNA

SEQ ID NO: 209840 - DNA, 80 bp, synthetic construct; identical to SEQ ID NO: 25110
  source 1..80: mol_type = other DNA

SEQ ID NO: 209841 - DNA, 80 bp, synthetic construct; identical to SEQ ID NO: 25111
  source 1..80: mol_type = other DNA

SEQ ID NO: 209842 - DNA, 80 bp, synthetic construct; identical to SEQ ID NO: 25112
  source 1..80: mol_type = other DNA

SEQ ID NO: 209843 - DNA, 80 bp, synthetic construct; identical to SEQ ID NO: 25113
  source 1..80: mol_type = other DNA

SEQ ID NO: 209844 - DNA, 80 bp, synthetic construct; identical to SEQ ID NO: 25114
  source 1..80: mol_type = other DNA

SEQ ID NO: 209845 - DNA, 80 bp, synthetic construct; identical to SEQ ID NO: 25115
  source 1..80: mol_type = other DNA

SEQ ID NO: 209846 - DNA, 80 bp, synthetic construct; identical to SEQ ID NO: 25116
  source 1..80: mol_type = other DNA

SEQ ID NO: 209847 - DNA, 80 bp, synthetic construct; identical to SEQ ID NO: 25117
  source 1..80: mol_type = other DNA

SEQ ID NO: 209848 - DNA, 80 bp, synthetic construct; identical to SEQ ID NO: 25118
  source 1..80: mol_type = other DNA

SEQ ID NO: 209849 - DNA, 80 bp, synthetic construct; identical to SEQ ID NO: 25119
  source 1..80: mol_type = other DNA

SEQ ID NO: 209850 - DNA, 80 bp, synthetic construct; identical to SEQ ID NO: 25120
  source 1..80: mol_type = other DNA

SEQ ID NO: 209851 - DNA, 80 bp, synthetic construct; identical to SEQ ID NO: 25121
  source 1..80: mol_type = other DNA

SEQ ID NO: 209852 - DNA, 80 bp, synthetic construct; identical to SEQ ID NO: 25122
  source 1..80: mol_type = other DNA

SEQ ID NO: 209853 - DNA, 80 bp, synthetic construct; identical to SEQ ID NO: 25123
  source 1..80: mol_type = other DNA

SEQ ID NO: 209854 - DNA, 80 bp, synthetic construct; identical to SEQ ID NO: 25124
  source 1..80: mol_type = other DNA

SEQ ID NO: 209855 - DNA, 80 bp, synthetic construct; identical to SEQ ID NO: 25125
  source 1..80: mol_type = other DNA

SEQ ID NO: 209856 - DNA, 80 bp, synthetic construct; identical to SEQ ID NO: 25126
  source 1..80: mol_type = other DNA

SEQ ID NO: 209857 - DNA, 80 bp, synthetic construct; identical to SEQ ID NO: 25127
  source 1..80: mol_type = other DNA

SEQ ID NO: 209858 - DNA, 80 bp, synthetic construct; identical to SEQ ID NO: 25128
  source 1..80: mol_type = other DNA

SEQ ID NO: 209859 - DNA, 80 bp, synthetic construct; identical to SEQ ID NO: 25129
  source 1..80: mol_type = other DNA

SEQ ID NO: 209860 - DNA, 80 bp, synthetic construct; identical to SEQ ID NO: 25130
  source 1..80: mol_type = other DNA

SEQ ID NO: 209861 - DNA, 80 bp, synthetic construct; identical to SEQ ID NO: 25131
  source 1..80: mol_type = other DNA

SEQ ID NO: 209862 - DNA, 80 bp, synthetic construct; identical to SEQ ID NO: 25132
  source 1..80: mol_type = other DNA

SEQ ID NO: 209863 - DNA, 80 bp, synthetic construct; identical to SEQ ID NO: 25133
  source 1..80: mol_type = other DNA

SEQ ID NO: 209864 - DNA, 80 bp, synthetic construct; identical to SEQ ID NO: 25134
  source 1..80: mol_type = other DNA

SEQ ID NO: 209865 - DNA, 80 bp, synthetic construct; identical to SEQ ID NO: 25135
  source 1..80: mol_type = other DNA

SEQ ID NO: 209866 - DNA, 80 bp, synthetic construct; identical to SEQ ID NO: 25136
  source 1..80: mol_type = other DNA

SEQ ID NO: 209867 - DNA, 80 bp, synthetic construct; identical to SEQ ID NO: 25137
  source 1..80: mol_type = other DNA

SEQ ID NO: 209868 - DNA, 80 bp, synthetic construct; identical to SEQ ID NO: 25138
  source 1..80: mol_type = other DNA

SEQ ID NO: 209869 - DNA, 80 bp, synthetic construct; identical to SEQ ID NO: 25139
  source 1..80: mol_type = other DNA

SEQ ID NO: 209870 - DNA, 80 bp, synthetic construct; identical to SEQ ID NO: 25140
  source 1..80: mol_type = other DNA

SEQ ID NO: 209871 - DNA, 80 bp, synthetic construct; identical to SEQ ID NO: 25141
  source 1..80: mol_type = other DNA

SEQ ID NO: 209872 - DNA, 80 bp, synthetic construct; identical to SEQ ID NO: 25142
  source 1..80: mol_type = other DNA

SEQ ID NO: 209873 - DNA, 80 bp, synthetic construct; identical to SEQ ID NO: 25143
  source 1..80: mol_type = other DNA

SEQ ID NO: 209874 - DNA, 80 bp, synthetic construct; identical to SEQ ID NO: 25144
  source 1..80: mol_type = other DNA

SEQ ID NO: 209875 - DNA, 80 bp, synthetic construct; identical to SEQ ID NO: 25145
  source 1..80: mol_type = other DNA

SEQ ID NO: 209876 - DNA, 80 bp, synthetic construct; identical to SEQ ID NO: 25146
  source 1..80: mol_type = other DNA

SEQ ID NO: 209877 - DNA, 80 bp, synthetic construct; identical to SEQ ID NO: 25147
  source 1..80: mol_type = other DNA

SEQ ID NO: 209878 - DNA, 80 bp, synthetic construct; identical to SEQ ID NO: 25148
  source 1..80: mol_type = other DNA

SEQ ID NO: 209879 - DNA, 80 bp, synthetic construct; identical to SEQ ID NO: 25149
  source 1..80: mol_type = other DNA

SEQ ID NO: 209880 - DNA, 80 bp, synthetic construct; identical to SEQ ID NO: 25150
  source 1..80: mol_type = other DNA

SEQ ID NO: 209881 - DNA, 80 bp, synthetic construct; identical to SEQ ID NO: 25151
  source 1..80: mol_type = other DNA

SEQ ID NO: 209882 - DNA, 80 bp, synthetic construct; identical to SEQ ID NO: 25152
  source 1..80: mol_type = other DNA

SEQ ID NO: 209883 - DNA, 80 bp, synthetic construct; identical to SEQ ID NO: 25153
  source 1..80: mol_type = other DNA

SEQ ID NO: 209884 - DNA, 80 bp, synthetic construct; identical to SEQ ID NO: 25154
  source 1..80: mol_type = other DNA

SEQ ID NO: 209885 - DNA, 80 bp, synthetic construct; identical to SEQ ID NO: 25155
  source 1..80: mol_type = other DNA

SEQ ID NO: 209886 - DNA, 80 bp, synthetic construct; identical to SEQ ID NO: 25156
  source 1..80: mol_type = other DNA

SEQ ID NO: 209887 - DNA, 80 bp, synthetic construct; identical to SEQ ID NO: 25157
  source 1..80: mol_type = other DNA

SEQ ID NO: 209888 - DNA, 80 bp, synthetic construct; identical to SEQ ID NO: 25158
  source 1..80: mol_type = other DNA

SEQ ID NO: 209889 - DNA, 80 bp, synthetic construct; identical to SEQ ID NO: 25159
  source 1..80: mol_type = other DNA

SEQ ID NO: 209890 - DNA, 80 bp, synthetic construct; identical to SEQ ID NO: 25160
  source 1..80: mol_type = other DNA

SEQ ID NO: 209891 - DNA, 80 bp, synthetic construct; identical to SEQ ID NO: 25161
  source 1..80: mol_type = other DNA

SEQ ID NO: 209892 - DNA, 80 bp, synthetic construct; identical to SEQ ID NO: 25162
  source 1..80: mol_type = other DNA

SEQ ID NO: 209893 - DNA, 80 bp, synthetic construct; identical to SEQ ID NO: 25163
  source 1..80: mol_type = other DNA

SEQ ID NO: 209894 - DNA, 80 bp, synthetic construct; identical to SEQ ID NO: 25164
  source 1..80: mol_type = other DNA

SEQ ID NO: 209895 - DNA, 80 bp, synthetic construct; identical to SEQ ID NO: 25165
  source 1..80: mol_type = other DNA

SEQ ID NO: 209896 - DNA, 80 bp, synthetic construct; identical to SEQ ID NO: 25166
  source 1..80: mol_type = other DNA

SEQ ID NO: 209897 - DNA, 80 bp, synthetic construct; identical to SEQ ID NO: 25167
  source 1..80: mol_type = other DNA

SEQ ID NO: 209898 - DNA, 80 bp, synthetic construct; identical to SEQ ID NO: 25168
  source 1..80: mol_type = other DNA

SEQ ID NO: 209899 - DNA, 80 bp, synthetic construct; identical to SEQ ID NO: 25169
  source 1..80: mol_type = other DNA

SEQ ID NO: 209900 - DNA, 80 bp, synthetic construct; identical to SEQ ID NO: 25170
  source 1..80: mol_type = other DNA

SEQ ID NO: 209901 - DNA, 80 bp, synthetic construct; identical to SEQ ID NO: 25171
  source 1..80: mol_type = other DNA

SEQ ID NO: 209902 - DNA, 80 bp, synthetic construct; identical to SEQ ID NO: 25172
  source 1..80: mol_type = other DNA

SEQ ID NO: 209903 - DNA, 80 bp, synthetic construct; identical to SEQ ID NO: 25173
  source 1..80: mol_type = other DNA

SEQ ID NO: 209904 - DNA, 80 bp, synthetic construct; identical to SEQ ID NO: 25174
  source 1..80: mol_type = other DNA

SEQ ID NO: 209905 - DNA, 80 bp, synthetic construct; identical to SEQ ID NO: 25175
  source 1..80: mol_type = other DNA

SEQ ID NO: 209906 - DNA, 80 bp, synthetic construct; identical to SEQ ID NO: 25176
  source 1..80: mol_type = other DNA

SEQ ID NO: 209907 - DNA, 80 bp, synthetic construct; identical to SEQ ID NO: 25177
  source 1..80: mol_type = other DNA

SEQ ID NO: 209908 - DNA, 80 bp, synthetic construct; identical to SEQ ID NO: 25178
  source 1..80: mol_type = other DNA

SEQ ID NO: 209909 - DNA, 80 bp, synthetic construct; identical to SEQ ID NO: 25179
  source 1..80: mol_type = other DNA

SEQ ID NO: 209910 - DNA, 80 bp, synthetic construct; identical to SEQ ID NO: 25180
  source 1..80: mol_type = other DNA

SEQ ID NO: 209911 - DNA, 80 bp, synthetic construct; identical to SEQ ID NO: 25181
  source 1..80: mol_type = other DNA

SEQ ID NO: 209912 - DNA, 80 bp, synthetic construct; identical to SEQ ID NO: 25182
  source 1..80: mol_type = other DNA

SEQ ID NO: 209913 - DNA, 80 bp, synthetic construct; identical to SEQ ID NO: 25183
  source 1..80: mol_type = other DNA

SEQ ID NO: 209914 - DNA, 80 bp, synthetic construct; identical to SEQ ID NO: 25184
  source 1..80: mol_type = other DNA

SEQ ID NO: 209915 - DNA, 80 bp, synthetic construct; identical to SEQ ID NO: 25185
  source 1..80: mol_type = other DNA

SEQ ID NO: 209916 - DNA, 80 bp, synthetic construct; identical to SEQ ID NO: 25186
  source 1..80: mol_type = other DNA

SEQ ID NO: 209917 - DNA, 80 bp, synthetic construct; identical to SEQ ID NO: 25187
  source 1..80: mol_type = other DNA

SEQ ID NO: 209918 - DNA, 80 bp, synthetic construct; identical to SEQ ID NO: 25188
  source 1..80: mol_type = other DNA

SEQ ID NO: 209919 - DNA, 80 bp, synthetic construct; identical to SEQ ID NO: 25189
  source 1..80: mol_type = other DNA

SEQ ID NO: 209920 - DNA, 80 bp, synthetic construct; identical to SEQ ID NO: 25190
  source 1..80: mol_type = other DNA

SEQ ID NO: 209921 - DNA, 80 bp, synthetic construct; identical to SEQ ID NO: 25191
  source 1..80: mol_type = other DNA

SEQ ID NO: 209922 - DNA, 80 bp, synthetic construct; identical to SEQ ID NO: 25192
  source 1..80: mol_type = other DNA

SEQ ID NO: 209923 - DNA, 80 bp, synthetic construct; identical to SEQ ID NO: 25193
  source 1..80: mol_type = other DNA

SEQ ID NO: 209924 - DNA, 80 bp, synthetic construct; identical to SEQ ID NO: 25194
  source 1..80: mol_type = other DNA

SEQ ID NO: 209925 - DNA, 80 bp, synthetic construct; identical to SEQ ID NO: 25195
  source 1..80: mol_type = other DNA

SEQ ID NO: 209926 - DNA, 80 bp, synthetic construct; identical to SEQ ID NO: 25196
  source 1..80: mol_type = other DNA

SEQ ID NO: 209927 - DNA, 80 bp, synthetic construct; identical to SEQ ID NO: 25197
  source 1..80: mol_type = other DNA

SEQ ID NO: 209928 - DNA, 80 bp, synthetic construct; identical to SEQ ID NO: 25198
  source 1..80: mol_type = other DNA

SEQ ID NO: 209929 - DNA, 80 bp, synthetic construct; identical to SEQ ID NO: 25199
  source 1..80: mol_type = other DNA

SEQ ID NO: 209930 - DNA, 80 bp, synthetic construct; identical to SEQ ID NO: 25200
  source 1..80: mol_type = other DNA

SEQ ID NO: 209931 - DNA, 80 bp, synthetic construct; identical to SEQ ID NO: 25201
  source 1..80: mol_type = other DNA

SEQ ID NO: 209932 - DNA, 80 bp, synthetic construct; identical to SEQ ID NO: 25202
  source 1..80: mol_type = other DNA

SEQ ID NO: 209933 - DNA, 80 bp, synthetic construct; identical to SEQ ID NO: 25203
  source 1..80: mol_type = other DNA

SEQ ID NO: 209934 - DNA, 80 bp, synthetic construct; identical to SEQ ID NO: 25204
  source 1..80: mol_type = other DNA

SEQ ID NO: 209935 - DNA, 80 bp, synthetic construct; identical to SEQ ID NO: 25205
  source 1..80: mol_type = other DNA

SEQ ID NO: 209936 - DNA, 80 bp, synthetic construct; identical to SEQ ID NO: 25206
  source 1..80: mol_type = other DNA

SEQ ID NO: 209937 - DNA, 80 bp, synthetic construct; identical to SEQ ID NO: 25207
  source 1..80: mol_type = other DNA

SEQ ID NO: 209938 - DNA, 80 bp, synthetic construct; identical to SEQ ID NO: 25208
  source 1..80: mol_type = other DNA

SEQ ID NO: 209939 - DNA, 80 bp, synthetic construct; identical to SEQ ID NO: 25209
  source 1..80: mol_type = other DNA

SEQ ID NO: 209940 - DNA, 80 bp, synthetic construct; identical to SEQ ID NO: 25210
  source 1..80: mol_type = other DNA

SEQ ID NO: 209941 - DNA, 80 bp, synthetic construct; identical to SEQ ID NO: 25211
  source 1..80: mol_type = other DNA

SEQ ID NO: 209942 - DNA, 80 bp, synthetic construct; identical to SEQ ID NO: 25212
  source 1..80: mol_type = other DNA

SEQ ID NO: 209943 - DNA, 80 bp, synthetic construct; identical to SEQ ID NO: 25213
  source 1..80: mol_type = other DNA

SEQ ID NO: 209944 - DNA, 80 bp, synthetic construct; identical to SEQ ID NO: 25214
  source 1..80: mol_type = other DNA

SEQ ID NO: 209945 - DNA, 80 bp, synthetic construct; identical to SEQ ID NO: 25215
  source 1..80: mol_type = other DNA

SEQ ID NO: 209946 - DNA, 80 bp, synthetic construct; identical to SEQ ID NO: 25216
  source 1..80: mol_type = other DNA

SEQ ID NO: 209947 - DNA, 80 bp, synthetic construct; identical to SEQ ID NO: 25217
  source 1..80: mol_type = other DNA

SEQ ID NO: 209948 - DNA, 80 bp, synthetic construct; identical to SEQ ID NO: 25218
  source 1..80: mol_type = other DNA

SEQ ID NO: 209949 - DNA, 80 bp, synthetic construct; identical to SEQ ID NO: 25219
  source 1..80: mol_type = other DNA

SEQ ID NO: 209950 - DNA, 80 bp, synthetic construct; identical to SEQ ID NO: 25220
  source 1..80: mol_type = other DNA

SEQ ID NO: 209951 - DNA, 80 bp, synthetic construct; identical to SEQ ID NO: 25221
  source 1..80: mol_type = other DNA

SEQ ID NO: 209952 - DNA, 80 bp, synthetic construct; identical to SEQ ID NO: 25222
  source 1..80: mol_type = other DNA

SEQ ID NO: 209953 - DNA, 80 bp, synthetic construct; identical to SEQ ID NO: 25223
  source 1..80: mol_type = other DNA

SEQ ID NO: 209954 - DNA, 80 bp, synthetic construct; identical to SEQ ID NO: 25224
  source 1..80: mol_type = other DNA

SEQ ID NO: 209955 - DNA, 80 bp, synthetic construct; identical to SEQ ID NO: 25225
  source 1..80: mol_type = other DNA

SEQ ID NO: 209956 - DNA, 80 bp, synthetic construct; identical to SEQ ID NO: 25226
  source 1..80: mol_type = other DNA

SEQ ID NO: 209957 - DNA, 80 bp, synthetic construct; identical to SEQ ID NO: 25227
  source 1..80: mol_type = other DNA

SEQ ID NO: 209958 - DNA, 80 bp, synthetic construct; identical to SEQ ID NO: 25228
  source 1..80: mol_type = other DNA

SEQ ID NO: 209959 - DNA, 80 bp, synthetic construct; identical to SEQ ID NO: 25229
  source 1..80: mol_type = other DNA

SEQ ID NO: 209960 - DNA, 80 bp, synthetic construct; identical to SEQ ID NO: 25230
  source 1..80: mol_type = other DNA

SEQ ID NO: 209961 - DNA, 80 bp, synthetic construct; identical to SEQ ID NO: 25231
  source 1..80: mol_type = other DNA

SEQ ID NO: 209962 - DNA, 80 bp, synthetic construct; identical to SEQ ID NO: 25232
  source 1..80: mol_type = other DNA

SEQ ID NO: 209963 - DNA, 80 bp, synthetic construct; identical to SEQ ID NO: 25233
  source 1..80: mol_type = other DNA

SEQ ID NO: 209964 - DNA, 80 bp, synthetic construct; identical to SEQ ID NO: 25234
  source 1..80: mol_type = other DNA

SEQ ID NO: 209965 - DNA, 80 bp, synthetic construct; identical to SEQ ID NO: 25235
  source 1..80: mol_type = other DNA

SEQ ID NO: 209966 - DNA, 80 bp, synthetic construct; identical to SEQ ID NO: 25236
  source 1..80: mol_type = other DNA

SEQ ID NO: 209967 - DNA, 80 bp, synthetic construct; identical to SEQ ID NO: 25237
  source 1..80: mol_type = other DNA

SEQ ID NO: 209968 - DNA, 80 bp, synthetic construct; identical to SEQ ID NO: 25238
  source 1..80: mol_type = other DNA

SEQ ID NO: 209969 - DNA, 80 bp, synthetic construct; identical to SEQ ID NO: 25239
  source 1..80: mol_type = other DNA

SEQ ID NO: 209970 - DNA, 80 bp, synthetic construct; identical to SEQ ID NO: 25240
  source 1..80: mol_type = other DNA

SEQ ID NO: 209971 - DNA, 80 bp, synthetic construct; identical to SEQ ID NO: 25241
  source 1..80: mol_type = other DNA

SEQ ID NO: 209972 - DNA, 80 bp, synthetic construct; identical to SEQ ID NO: 25242
  source 1..80: mol_type = other DNA

SEQ ID NO: 209973 - DNA, 80 bp, synthetic construct; identical to SEQ ID NO: 25243
  source 1..80: mol_type = other DNA

SEQ ID NO: 209974 - DNA, 80 bp, synthetic construct; identical to SEQ ID NO: 25244
  source 1..80: mol_type = other DNA

SEQ ID NO: 209975 - DNA, 80 bp, synthetic construct; identical to SEQ ID NO: 25245
  source 1..80: mol_type = other DNA

SEQ ID NO: 209976 - DNA, 80 bp, synthetic construct; identical to SEQ ID NO: 25246
  source 1..80: mol_type = other DNA

SEQ ID NO: 209977 - DNA, 80 bp, synthetic construct; identical to SEQ ID NO: 25247
  source 1..80: mol_type = other DNA

SEQ ID NO: 209978 - DNA, 80 bp, synthetic construct; identical to SEQ ID NO: 25248
  source 1..80: mol_type = other DNA

SEQ ID NO: 209979 - DNA, 80 bp, synthetic construct; identical to SEQ ID NO: 25249
  source 1..80: mol_type = other DNA

SEQ ID NO: 209980 - DNA, 80 bp, synthetic construct; identical to SEQ ID NO: 25250
  source 1..80: mol_type = other DNA

SEQ ID NO: 209981 - DNA, 80 bp, synthetic construct; identical to SEQ ID NO: 25251
  source 1..80: mol_type = other DNA

SEQ ID NO: 209982 - DNA, 80 bp, synthetic construct; identical to SEQ ID NO: 25252
  source 1..80: mol_type = other DNA

SEQ ID NO: 209983 - DNA, 80 bp, synthetic construct; identical to SEQ ID NO: 25253
  source 1..80: mol_type = other DNA

SEQ ID NO: 209984 - DNA, 80 bp, synthetic construct; identical to SEQ ID NO: 25254
  source 1..80: mol_type = other DNA

SEQ ID NO: 209985 - DNA, 80 bp, synthetic construct; identical to SEQ ID NO: 25255
  source 1..80: mol_type = other DNA

SEQ ID NO: 209986 - DNA, 80 bp, synthetic construct; identical to SEQ ID NO: 25256
  source 1..80: mol_type = other DNA

SEQ ID NO: 209987 - DNA, 80 bp, synthetic construct; identical to SEQ ID NO: 25257
  source 1..80: mol_type = other DNA

SEQ ID NO: 209988 - DNA, 80 bp, synthetic construct; identical to SEQ ID NO: 25258
  source 1..80: mol_type = other DNA

SEQ ID NO: 209989 - DNA, 80 bp, synthetic construct; identical to SEQ ID NO: 25259
  source 1..80: mol_type = other DNA

SEQ ID NO: 209990 - DNA, 80 bp, synthetic construct; identical to SEQ ID NO: 25260
  source 1..80: mol_type = other DNA

SEQ ID NO: 209991 - DNA, 80 bp, synthetic construct; identical to SEQ ID NO: 25261
  source 1..80: mol_type = other DNA

SEQ ID NO: 209992 - DNA, 80 bp, synthetic construct; identical to SEQ ID NO: 25262
  source 1..80: mol_type = other DNA

SEQ ID NO: 209993 - DNA, 80 bp, synthetic construct; identical to SEQ ID NO: 25263
  source 1..80: mol_type = other DNA

SEQ ID NO: 209994 - DNA, 80 bp, synthetic construct; identical to SEQ ID NO: 25264
  source 1..80: mol_type = other DNA

SEQ ID NO: 209995 - DNA, 80 bp, synthetic construct; identical to SEQ ID NO: 25265
  source 1..80: mol_type = other DNA

SEQ ID NO: 209996 - DNA, 80 bp, synthetic construct; identical to SEQ ID NO: 25266
  source 1..80: mol_type = other DNA

SEQ ID NO: 209997 - DNA, 80 bp, synthetic construct; identical to SEQ ID NO: 25267
  source 1..80: mol_type = other DNA

SEQ ID NO: 209998 - DNA, 80 bp, synthetic construct; identical to SEQ ID NO: 25268
  source 1..80: mol_type = other DNA

SEQ ID NO: 209999 - DNA, 80 bp, synthetic construct; identical to SEQ ID NO: 25269
  source 1..80: mol_type = other DNA

SEQ ID NO: 210000 - DNA, 80 bp, synthetic construct; identical to SEQ ID NO: 25270
  source 1..80: mol_type = other DNA

SEQ ID NO: 210001 - DNA, 80 bp, synthetic construct; identical to SEQ ID NO: 25271
  source 1..80: mol_type = other DNA

SEQ ID NO: 210002 - DNA, 80 bp, synthetic construct; identical to SEQ ID NO: 25272
  source 1..80: mol_type = other DNA

SEQ ID NO: 210003 - DNA, 80 bp, synthetic construct; identical to SEQ ID NO: 25273
  source 1..80: mol_type = other DNA

SEQ ID NO: 210004 - DNA, 80 bp, synthetic construct; identical to SEQ ID NO: 25274
  source 1..80: mol_type = other DNA

SEQ ID NO: 210005 - DNA, 80 bp, synthetic construct; identical to SEQ ID NO: 25275
  source 1..80: mol_type = other DNA

SEQ ID NO: 210006 - DNA, 80 bp, synthetic construct; identical to SEQ ID NO: 25276
  source 1..80: mol_type = other DNA

SEQ ID NO: 210007 - DNA, 80 bp, synthetic construct; identical to SEQ ID NO: 25277
  source 1..80: mol_type = other DNA

SEQ ID NO: 210008 - DNA, 80 bp, synthetic construct; identical to SEQ ID NO: 25278
  source 1..80: mol_type = other DNA

SEQ ID NO: 210009 - DNA, 80 bp, synthetic construct; identical to SEQ ID NO: 25279
  source 1..80: mol_type = other DNA

SEQ ID NO: 210010 - DNA, 80 bp, synthetic construct; identical to SEQ ID NO: 25280
  source 1..80: mol_type = other DNA

SEQ ID NO: 210011 - DNA, 80 bp, synthetic construct; identical to SEQ ID NO: 25281
  source 1..80: mol_type = other DNA

SEQ ID NO: 210012 - DNA, 80 bp, synthetic construct; identical to SEQ ID NO: 25282
  source 1..80: mol_type = other DNA

SEQ ID NO: 210013 - DNA, 80 bp, synthetic construct; identical to SEQ ID NO: 25283
  source 1..80: mol_type = other DNA

SEQ ID NO: 210014 - DNA, 80 bp, synthetic construct; identical to SEQ ID NO: 25284
  source 1..80: mol_type = other DNA

SEQ ID NO: 210015 - DNA, 80 bp, synthetic construct; identical to SEQ ID NO: 25285
  source 1..80: mol_type = other DNA

SEQ ID NO: 210016 - DNA, 80 bp, synthetic construct; identical to SEQ ID NO: 25286
  source 1..80: mol_type = other DNA

SEQ ID NO: 210017 - DNA, 80 bp, synthetic construct; identical to SEQ ID NO: 25287
  source 1..80: mol_type = other DNA

SEQ ID NO: 210018 - DNA, 80 bp, synthetic construct; identical to SEQ ID NO: 25288
  source 1..80: mol_type = other DNA

SEQ ID NO: 210019 - DNA, 80 bp, synthetic construct; identical to SEQ ID NO: 25289
  source 1..80: mol_type = other DNA

SEQ ID NO: 210020 - DNA, 80 bp, synthetic construct; identical to SEQ ID NO: 25290
  source 1..80: mol_type = other DNA

SEQ ID NO: 210021 - DNA, 80 bp, synthetic construct; identical to SEQ ID NO: 25291
  source 1..80: mol_type = other DNA

SEQ ID NO: 210022 - DNA, 80 bp, synthetic construct; identical to SEQ ID NO: 25292
  source 1..80: mol_type = other DNA

SEQ ID NO: 210023 - DNA, 80 bp, synthetic construct; identical to SEQ ID NO: 25293
  source 1..80: mol_type = other DNA

SEQ ID NO: 210024 - DNA, 80 bp, synthetic construct; identical to SEQ ID NO: 25294
  source 1..80: mol_type = other DNA

SEQ ID NO: 210025 - DNA, 80 bp, synthetic construct; identical to SEQ ID NO: 25295
  source 1..80: mol_type = other DNA

SEQ ID NO: 210026 - DNA, 80 bp, synthetic construct; identical to SEQ ID NO: 25296
  source 1..80: mol_type = other DNA

SEQ ID NO: 210027 - DNA, 80 bp, synthetic construct; identical to SEQ ID NO: 25297
  source 1..80: mol_type = other DNA

SEQ ID NO: 210028 - DNA, 80 bp, synthetic construct; identical to SEQ ID NO: 25298
  source 1..80: mol_type = other DNA

SEQ ID NO: 210029 - DNA, 80 bp, synthetic construct; identical to SEQ ID NO: 25299
  source 1..80: mol_type = other DNA

SEQ ID NO: 210030 - DNA, 80 bp, synthetic construct; identical to SEQ ID NO: 25300
  source 1..80: mol_type = other DNA

SEQ ID NO: 210031 - DNA, 80 bp, synthetic construct; identical to SEQ ID NO: 25301
  source 1..80: mol_type = other DNA

SEQ ID NO: 210032 - DNA, 80 bp, synthetic construct; identical to SEQ ID NO: 25302
  source 1..80: mol_type = other DNA

SEQ ID NO: 210033 - DNA, 80 bp, synthetic construct; identical to SEQ ID NO: 25303
  source 1..80: mol_type = other DNA

SEQ ID NO: 210034 - DNA, 80 bp, synthetic construct; identical to SEQ ID NO: 25304
  source 1..80: mol_type = other DNA

SEQ ID NO: 210035 - DNA, 80 bp, synthetic construct; identical to SEQ ID NO: 25305
  source 1..80: mol_type = other DNA

SEQ ID NO: 210036 - DNA, 80 bp, synthetic construct; identical to SEQ ID NO: 25306
  source 1..80: mol_type = other DNA

SEQ ID NO: 210037 - DNA, 80 bp, synthetic construct; identical to SEQ ID NO: 25307
  source 1..80: mol_type = other DNA

SEQ ID NO: 210038 - DNA, 80 bp, synthetic construct; identical to SEQ ID NO: 25308
  source 1..80: mol_type = other DNA

SEQ ID NO: 210039 - DNA, 80 bp, synthetic construct; identical to SEQ ID NO: 25309
  source 1..80: mol_type = other DNA

SEQ ID NO: 210040 - DNA, 80 bp, synthetic construct; identical to SEQ ID NO: 25310
  source 1..80: mol_type = other DNA

SEQ ID NO: 210041 - DNA, 80 bp, synthetic construct; identical to SEQ ID NO: 25311
  source 1..80: mol_type = other DNA

SEQ ID NO: 210042 - DNA, 80 bp, synthetic construct; identical to SEQ ID NO: 25312
  source 1..80: mol_type = other DNA

SEQ ID NO: 210043 - DNA, 80 bp, synthetic construct; identical to SEQ ID NO: 25313
  source 1..80: mol_type = other DNA

SEQ ID NO: 210044 - DNA, 80 bp, synthetic construct; identical to SEQ ID NO: 25314
  source 1..80: mol_type = other DNA

SEQ ID NO: 210045 - DNA, 80 bp, synthetic construct; identical to SEQ ID NO: 25315
  source 1..80: mol_type = other DNA

SEQ ID NO: 210046 - DNA, 80 bp, synthetic construct; identical to SEQ ID NO: 25316
  source 1..80: mol_type = other DNA

SEQ ID NO: 210047 - DNA, 80 bp, synthetic construct; identical to SEQ ID NO: 25317
  source 1..80: mol_type = other DNA

SEQ ID NO: 210048 - DNA, 80 bp, synthetic construct; identical to SEQ ID NO: 25318
  source 1..80: mol_type = other DNA

SEQ ID NO: 210049 - DNA, 80 bp, synthetic construct; identical to SEQ ID NO: 25319
  source 1..80: mol_type = other DNA

SEQ ID NO: 210050 - DNA, 80 bp, synthetic construct; identical to SEQ ID NO: 25320
  source 1..80: mol_type = other DNA

SEQ ID NO: 210051 - DNA, 80 bp, synthetic construct; identical to SEQ ID NO: 25321
  source 1..80: mol_type = other DNA

SEQ ID NO: 210052 - DNA, 80 bp, synthetic construct; identical to SEQ ID NO: 25322
  source 1..80: mol_type = other DNA

SEQ ID NO: 210053 - DNA, 80 bp, synthetic construct; identical to SEQ ID NO: 25323
  source 1..80: mol_type = other DNA

SEQ ID NO: 210054 - DNA, 80 bp, synthetic construct; identical to SEQ ID NO: 25324
  source 1..80: mol_type = other DNA

SEQ ID NO: 210055 - DNA, 80 bp, synthetic construct; identical to SEQ ID NO: 25325
  source 1..80: mol_type = other DNA

SEQ ID NO: 210056 - DNA, 80 bp, synthetic construct; identical to SEQ ID NO: 25326
  source 1..80: mol_type = other DNA

SEQ ID NO: 210057 - DNA, 80 bp, synthetic construct; identical to SEQ ID NO: 25327
  source 1..80: mol_type = other DNA

SEQ ID NO: 210058 - DNA, 80 bp, synthetic construct; identical to SEQ ID NO: 25328
  source 1..80: mol_type = other DNA

SEQ ID NO: 210059 - DNA, 80 bp, synthetic construct; identical to SEQ ID NO: 25329
  source 1..80: mol_type = other DNA

SEQ ID NO: 210060 - DNA, 80 bp, synthetic construct; identical to SEQ ID NO: 25330
  source 1..80: mol_type = other DNA

SEQ ID NO: 210061 - DNA, 80 bp, synthetic construct; identical to SEQ ID NO: 25331
  source 1..80: mol_type = other DNA

SEQ ID NO: 210062 - DNA, 80 bp, synthetic construct; identical to SEQ ID NO: 25332
  source 1..80: mol_type = other DNA

SEQ ID NO: 210063 - DNA, 80 bp, synthetic construct; identical to SEQ ID NO: 25333
  source 1..80: mol_type = other DNA

SEQ ID NO: 210064 - DNA, 80 bp, synthetic construct; identical to SEQ ID NO: 25334
  source 1..80: mol_type = other DNA

SEQ ID NO: 210065 - DNA, 80 bp, synthetic construct; identical to SEQ ID NO: 25335
  source 1..80: mol_type = other DNA

SEQ ID NO: 210066 - DNA, 80 bp, synthetic construct; identical to SEQ ID NO: 25336
  source 1..80: mol_type = other DNA

SEQ ID NO: 210067 - DNA, 80 bp, synthetic construct; identical to SEQ ID NO: 25337
  source 1..80: mol_type = other DNA

SEQ ID NO: 210068 - DNA, 80 bp, synthetic construct; identical to SEQ ID NO: 25338
  source 1..80: mol_type = other DNA

SEQ ID NO: 210069 - DNA, 80 bp, synthetic construct; identical to SEQ ID NO: 25339
  source 1..80: mol_type = other DNA

SEQ ID NO: 210070 - DNA, 80 bp, synthetic construct; identical to SEQ ID NO: 25340
  source 1..80: mol_type = other DNA

SEQ ID NO: 210071 - DNA, 80 bp, synthetic construct; identical to SEQ ID NO: 25341
  source 1..80: mol_type = other DNA

SEQ ID NO: 210072 - DNA, 80 bp, synthetic construct; identical to SEQ ID NO: 25342
  source 1..80: mol_type = other DNA

SEQ ID NO: 210073 - DNA, 80 bp, synthetic construct; identical to SEQ ID NO: 25343
  source 1..80: mol_type = other DNA

SEQ ID NO: 210074 - DNA, 80 bp, synthetic construct; identical to SEQ ID NO: 25344
  source 1..80: mol_type = other DNA

SEQ ID NO: 210075 - DNA, 80 bp, synthetic construct; identical to SEQ ID NO: 25345
  source 1..80: mol_type = other DNA

SEQ ID NO: 210076 - DNA, 80 bp, synthetic construct; identical to SEQ ID NO: 25346
  source 1..80: mol_type = other DNA

SEQ ID NO: 210077 - DNA, 80 bp, synthetic construct; identical to SEQ ID NO: 25347
  source 1..80: mol_type = other DNA

SEQ ID NO: 210078 - DNA, 80 bp, synthetic construct; identical to SEQ ID NO: 25348
  source 1..80: mol_type = other DNA

SEQ ID NO: 210079 - DNA, 80 bp, synthetic construct; identical to SEQ ID NO: 25349
  source 1..80: mol_type = other DNA

SEQ ID NO: 210080 - DNA, 80 bp, synthetic construct; identical to SEQ ID NO: 25350
  source 1..80: mol_type = other DNA

SEQ ID NO: 210081 - DNA, 80 bp, synthetic construct; identical to SEQ ID NO: 25351
  source 1..80: mol_type = other DNA

SEQ ID NO: 210082 - DNA, 80 bp, synthetic construct; identical to SEQ ID NO: 25352
  source 1..80: mol_type = other DNA

SEQ ID NO: 210083 - DNA, 80 bp, synthetic construct; identical to SEQ ID NO: 25353
  source 1..80: mol_type = other DNA

SEQ ID NO: 210084 - DNA, 80 bp, synthetic construct; identical to SEQ ID NO: 25354
  source 1..80: mol_type = other DNA

SEQ ID NO: 210085 - DNA, 80 bp, synthetic construct; identical to SEQ ID NO: 25355
  source 1..80: mol_type = other DNA

SEQ ID NO: 210086 - DNA, 80 bp, synthetic construct; identical to SEQ ID NO: 25356
  source 1..80: mol_type = other DNA

SEQ ID NO: 210087 - DNA, 80 bp, synthetic construct; identical to SEQ ID NO: 25357
  source 1..80: mol_type = other DNA

SEQ ID NO: 210088 - DNA, 80 bp, synthetic construct; identical to SEQ ID NO: 25358
  source 1..80: mol_type = other DNA

SEQ ID NO: 210089 - DNA, 80 bp, synthetic construct; identical to SEQ ID NO: 25359
  source 1..80: mol_type = other DNA

SEQ ID NO: 210090 - DNA, 80 bp, synthetic construct; identical to SEQ ID NO: 25360
  source 1..80: mol_type = other DNA

SEQ ID NO: 210091 - DNA, 80 bp, synthetic construct; identical to SEQ ID NO: 25361
  source 1..80: mol_type = other DNA

SEQ ID NO: 210092 - DNA, 80 bp, synthetic construct; identical to SEQ ID NO: 25362
  source 1..80: mol_type = other DNA

SEQ ID NO: 210093 - DNA, 80 bp, synthetic construct; identical to SEQ ID NO: 25363
  source 1..80: mol_type = other DNA

SEQ ID NO: 210094 - DNA, 80 bp, synthetic construct; identical to SEQ ID NO: 25364
  source 1..80: mol_type = other DNA

SEQ ID NO: 210095 - DNA, 80 bp, synthetic construct; identical to SEQ ID NO: 25365
  source 1..80: mol_type = other DNA

SEQ ID NO: 210096 - DNA, 80 bp, synthetic construct; identical to SEQ ID NO: 25366
  source 1..80: mol_type = other DNA

SEQ ID NO: 210097 - DNA, 80 bp, synthetic construct; identical to SEQ ID NO: 25367
  source 1..80: mol_type = other DNA

SEQ ID NO: 210098 - DNA, 80 bp, synthetic construct; identical to SEQ ID NO: 25368
  source 1..80: mol_type = other DNA

SEQ ID NO: 210099 - DNA, 80 bp, synthetic construct; identical to SEQ ID NO: 25369
  source 1..80: mol_type = other DNA

SEQ ID NO: 210100 - DNA, 80 bp, synthetic construct; identical to SEQ ID NO: 25370
  source 1..80: mol_type = other DNA

SEQ ID NO: 210101 - DNA, 80 bp, synthetic construct; identical to SEQ ID NO: 25371
  source 1..80: mol_type = other DNA

SEQ ID NO: 210102 - DNA, 80 bp, synthetic construct; identical to SEQ ID NO: 25372
  source 1..80: mol_type = other DNA

SEQ ID NO: 210103 - DNA, 80 bp, synthetic construct; identical to SEQ ID NO: 25373
  source 1..80: mol_type = other DNA

SEQ ID NO: 210104 - DNA, 80 bp, synthetic construct; identical to SEQ ID NO: 25374
  source 1..80: mol_type = other DNA

SEQ ID NO: 210105 - DNA, 80 bp, synthetic construct; identical to SEQ ID NO: 25375
  source 1..80: mol_type = other DNA

SEQ ID NO: 210106 - DNA, 80 bp, synthetic construct; identical to SEQ ID NO: 25376
  source 1..80: mol_type = other DNA

SEQ ID NO: 210107 - DNA, 80 bp, synthetic construct; identical to SEQ ID NO: 25377
  source 1..80: mol_type = other DNA

SEQ ID NO: 210108 - DNA, 80 bp, synthetic construct; identical to SEQ ID NO: 25378
  source 1..80: mol_type = other DNA

SEQ ID NO: 210109 - DNA, 80 bp, synthetic construct; identical to SEQ ID NO: 25379
  source 1..80: mol_type = other DNA

SEQ ID NO: 210110 - DNA, 80 bp, synthetic construct; identical to SEQ ID NO: 25380
  source 1..80: mol_type = other DNA

SEQ ID NO: 210111 - DNA, 80 bp, synthetic construct; identical to SEQ ID NO: 25381
  source 1..80: mol_type = other DNA

SEQ ID NO: 210112 - DNA, 80 bp, synthetic construct; identical to SEQ ID NO: 25382
  source 1..80: mol_type = other DNA

SEQ ID NO: 210113 - DNA, 80 bp, synthetic construct; identical to SEQ ID NO: 25383
  source 1..80: mol_type = other DNA

SEQ ID NO: 210114 - DNA, 80 bp, synthetic construct; identical to SEQ ID NO: 25384
  source 1..80: mol_type = other DNA

SEQ ID NO: 210115 - DNA, 80 bp, synthetic construct; identical to SEQ ID NO: 25385
  source 1..80: mol_type = other DNA

SEQ ID NO: 210116 - DNA, 80 bp, synthetic construct; identical to SEQ ID NO: 25386
  source 1..80: mol_type = other DNA

SEQ ID NO: 210117 - DNA, 80 bp, synthetic construct; identical to SEQ ID NO: 25387
  source 1..80: mol_type = other DNA

SEQ ID NO: 210118 - DNA, 80 bp, synthetic construct; identical to SEQ ID NO: 25388
  source 1..80: mol_type = other DNA

SEQ ID NO: 210119 - DNA, 80 bp, synthetic construct; identical to SEQ ID NO: 25389
  source 1..80: mol_type = other DNA

SEQ ID NO: 210120 - DNA, 80 bp, synthetic construct; identical to SEQ ID NO: 25390
  source 1..80: mol_type = other DNA

SEQ ID NO: 210121 - DNA, 80 bp, synthetic construct; identical to SEQ ID NO: 25391
  source 1..80: mol_type = other DNA

SEQ ID NO: 210122 - DNA, 80 bp, synthetic construct; identical to SEQ ID NO: 25392
  source 1..80: mol_type = other DNA

SEQ ID NO: 210123 - DNA, 80 bp, synthetic construct; identical to SEQ ID NO: 25393
  source 1..80: mol_type = other DNA

SEQ ID NO: 210124 - DNA, 80 bp, synthetic construct; identical to SEQ ID NO: 25394
  source 1..80: mol_type = other DNA

SEQ ID NO: 210125 - DNA, 80 bp, synthetic construct; identical to SEQ ID NO: 25395
  source 1..80: mol_type = other DNA

SEQ ID NO: 210126 - DNA, 80 bp, synthetic construct; identical to SEQ ID NO: 25396
  source 1..80: mol_type = other DNA

SEQ ID NO: 210127 - DNA, 80 bp, synthetic construct; identical to SEQ ID NO: 25397
  source 1..80: mol_type = other DNA

SEQ ID NO: 210128 - DNA, 80 bp, synthetic construct; identical to SEQ ID NO: 25398
  source 1..80: mol_type = other DNA

SEQ ID NO: 210129 - DNA, 80 bp, synthetic construct; identical to SEQ ID NO: 25399
  source 1..80: mol_type = other DNA

SEQ ID NO: 210130 - DNA, 80 bp, synthetic construct; identical to SEQ ID NO: 25400
  source 1..80: mol_type = other DNA

SEQ ID NO: 210131 - DNA, 80 bp, synthetic construct; identical to SEQ ID NO: 25401
  source 1..80: mol_type = other DNA

SEQ ID NO: 210132 - DNA, 80 bp, synthetic construct; identical to SEQ ID NO: 25402
  source 1..80: mol_type = other DNA

SEQ ID NO: 210133 - DNA, 80 bp, synthetic construct; identical to SEQ ID NO: 25403
  source 1..80: mol_type = other DNA

SEQ ID NO: 210134 - DNA, 80 bp, synthetic construct; identical to SEQ ID NO: 25404
  source 1..80: mol_type = other DNA

SEQ ID NO: 210135 - DNA, 80 bp, synthetic construct; identical to SEQ ID NO: 25405
  source 1..80: mol_type = other DNA

SEQ ID NO: 210136 - DNA, 80 bp, synthetic construct; identical to SEQ ID NO: 25406
  source 1..80: mol_type = other DNA

SEQ ID NO: 210137 - DNA, 80 bp, synthetic construct; identical to SEQ ID NO: 25407
  source 1..80: mol_type = other DNA

SEQ ID NO: 210138 - DNA, 80 bp, synthetic construct; identical to SEQ ID NO: 25408
  source 1..80: mol_type = other DNA

SEQ ID NO: 210139 - DNA, 80 bp, synthetic construct; identical to SEQ ID NO: 25409
  source 1..80: mol_type = other DNA

SEQ ID NO: 210140 - DNA, 80 bp, synthetic construct; identical to SEQ ID NO: 25410
  source 1..80: mol_type = other DNA

SEQ ID NO: 210141 - DNA, 80 bp, synthetic construct; identical to SEQ ID NO: 25411
  source 1..80: mol_type = other DNA

SEQ ID NO: 210142 - DNA, 80 bp, synthetic construct; identical to SEQ ID NO: 25412
  source 1..80: mol_type = other DNA

SEQ ID NO: 210143 - DNA, 80 bp, synthetic construct; identical to SEQ ID NO: 25413
  source 1..80: mol_type = other DNA

SEQ ID NO: 210144 - DNA, 80 bp, synthetic construct; identical to SEQ ID NO: 25414
  source 1..80: mol_type = other DNA

SEQ ID NO: 210145 - DNA, 80 bp, synthetic construct; identical to SEQ ID NO: 25415
  source 1..80: mol_type = other DNA

SEQ ID NO: 210146 - DNA, 80 bp, synthetic construct; identical to SEQ ID NO: 25416
  source 1..80: mol_type = other DNA

SEQ ID NO: 210147 - DNA, 80 bp, synthetic construct; identical to SEQ ID NO: 25417
  source 1..80: mol_type = other DNA

SEQ ID NO: 210148 - DNA, 80 bp, synthetic construct; identical to SEQ ID NO: 25418
  source 1..80: mol_type = other DNA

SEQ ID NO: 210149 - DNA, 80 bp, synthetic construct; identical to SEQ ID NO: 25419
  source 1..80: mol_type = other DNA

SEQ ID NO: 210150 - DNA, 80 bp, synthetic construct; identical to SEQ ID NO: 25420
  source 1..80: mol_type = other DNA

SEQ ID NO: 210151 - DNA, 80 bp, synthetic construct; identical to SEQ ID NO: 25421
  source 1..80: mol_type = other DNA

SEQ ID NO: 210152 - DNA, 80 bp, synthetic construct; identical to SEQ ID NO: 25422
  source 1..80: mol_type = other DNA

SEQ ID NO: 210153 - DNA, 80 bp, synthetic construct; identical to SEQ ID NO: 25423
  source 1..80: mol_type = other DNA

SEQ ID NO: 210154 - DNA, 80 bp, synthetic construct; identical to SEQ ID NO: 25424
  source 1..80: mol_type = other DNA

SEQ ID NO: 210155 - DNA, 80 bp, synthetic construct; identical to SEQ ID NO: 25425
  source 1..80: mol_type = other DNA

SEQ ID NO: 210156 - DNA, 80 bp, synthetic construct; identical to SEQ ID NO: 25426
  source 1..80: mol_type = other DNA

SEQ ID NO: 210157 - DNA, 80 bp, synthetic construct; identical to SEQ ID NO: 25427
  source 1..80: mol_type = other DNA

SEQ ID NO: 210158 - DNA, 80 bp, synthetic construct; identical to SEQ ID NO: 25428
  source 1..80: mol_type = other DNA

SEQ ID NO: 210159 - DNA, 80 bp, synthetic construct; identical to SEQ ID NO: 25429
  source 1..80: mol_type = other DNA

SEQ ID NO: 210160 - DNA, 80 bp, synthetic construct; identical to SEQ ID NO: 25430
  source 1..80: mol_type = other DNA

SEQ ID NO: 210161 - DNA, 80 bp, synthetic construct; identical to SEQ ID NO: 25431
  source 1..80: mol_type = other DNA

SEQ ID NO: 210162 - DNA, 80 bp, synthetic construct; identical to SEQ ID NO: 25432
  source 1..80: mol_type = other DNA

SEQ ID NO: 210163 - DNA, 80 bp, synthetic construct; identical to SEQ ID NO: 25433
  source 1..80: mol_type = other DNA

SEQ ID NO: 210164 - DNA, 80 bp, synthetic construct; identical to SEQ ID NO: 25434
  source 1..80: mol_type = other DNA

SEQ ID NO: 210165 - DNA, 80 bp, synthetic construct; identical to SEQ ID NO: 25435
  source 1..80: mol_type = other DNA

SEQ ID NO: 210166 - DNA, 80 bp, synthetic construct; identical to SEQ ID NO: 25436
  source 1..80: mol_type = other DNA

SEQ ID NO: 210167 - DNA, 80 bp, synthetic construct; identical to SEQ ID NO: 25437
  source 1..80: mol_type = other DNA

SEQ ID NO: 210168 - DNA, 80 bp, synthetic construct; identical to SEQ ID NO: 25438
  source 1..80: mol_type = other DNA

SEQ ID NO: 210169 - DNA, 80 bp, synthetic construct; identical to SEQ ID NO: 25439
  source 1..80: mol_type = other DNA

SEQ ID NO: 210170 - DNA, 80 bp, synthetic construct; identical to SEQ ID NO: 25440
  source 1..80: mol_type = other DNA

SEQ ID NO: 210171 - DNA, 80 bp, synthetic construct; identical to SEQ ID NO: 25441
  source 1..80: mol_type = other DNA

SEQ ID NO: 210172 - DNA, 80 bp, synthetic construct; identical to SEQ ID NO: 25442
  source 1..80: mol_type = other DNA

SEQ ID NO: 210173 - DNA, 80 bp, synthetic construct; identical to SEQ ID NO: 25443
  source 1..80: mol_type = other DNA

SEQ ID NO: 210174 - DNA, 80 bp, synthetic construct; identical to SEQ ID NO: 25444
  source 1..80: mol_type = other DNA

SEQ ID NO: 210175 - DNA, 80 bp, synthetic construct; identical to SEQ ID NO: 25445
  source 1..80: mol_type = other DNA

SEQ ID NO: 210176 - DNA, 80 bp, synthetic construct; identical to SEQ ID NO: 25446
  source 1..80: mol_type = other DNA

SEQ ID NO: 210177 - DNA, 80 bp, synthetic construct; identical to SEQ ID NO: 25447
  source 1..80: mol_type = other DNA

SEQ ID NO: 210178 - DNA, 80 bp, synthetic construct; identical to SEQ ID NO: 25448
  source 1..80: mol_type = other DNA

SEQ ID NO: 210179 - DNA, 80 bp, synthetic construct; identical to SEQ ID NO: 25449
  source 1..80: mol_type = other DNA

SEQ ID NO: 210180 - DNA, 80 bp, synthetic construct; identical to SEQ ID NO: 25450
  source 1..80: mol_type = other DNA

SEQ ID NO: 210181 - DNA, 80 bp, synthetic construct; identical to SEQ ID NO: 25451
  source 1..80: mol_type = other DNA

SEQ ID NO: 210182 - DNA, 80 bp, synthetic construct; identical to SEQ ID NO: 25452
  source 1..80: mol_type = other DNA

SEQ ID NO: 210183 - DNA, 80 bp, synthetic construct; identical to SEQ ID NO: 25453
  source 1..80: mol_type = other DNA

SEQ ID NO: 210184 - DNA, 80 bp, synthetic construct; identical to SEQ ID NO: 25454
  source 1..80: mol_type = other DNA

SEQ ID NO: 210185 - DNA, 80 bp, synthetic construct; identical to SEQ ID NO: 25455
  source 1..80: mol_type = other DNA

SEQ ID NO: 210186 - DNA, 80 bp, synthetic construct; identical to SEQ ID NO: 25456
  source 1..80: mol_type = other DNA

SEQ ID NO: 210187 - DNA, 80 bp, synthetic construct; identical to SEQ ID NO: 25457
  source 1..80: mol_type = other DNA

SEQ ID NO: 210188 - DNA, 80 bp, synthetic construct; identical to SEQ ID NO: 25458
  source 1..80: mol_type = other DNA

SEQ ID NO: 210189 - DNA, 80 bp, synthetic construct; identical to SEQ ID NO: 25459
  source 1..80: mol_type = other DNA

SEQ ID NO: 210190 - DNA, 80 bp, synthetic construct; identical to SEQ ID NO: 25460
  source 1..80: mol_type = other DNA

SEQ ID NO: 210191 - DNA, 80 bp, synthetic construct; identical to SEQ ID NO: 25461
  source 1..80: mol_type = other DNA

SEQ ID NO: 210192 - DNA, 80 bp, synthetic construct; identical to SEQ ID NO: 25462
  source 1..80: mol_type = other DNA

SEQ ID NO: 210193 - DNA, 80 bp, synthetic construct; identical to SEQ ID NO: 25463
  source 1..80: mol_type = other DNA

SEQ ID NO: 210194 - DNA, 80 bp, synthetic construct; identical to SEQ ID NO: 25464
  source 1..80: mol_type = other DNA

SEQ ID NO: 210195 - DNA, 80 bp, synthetic construct; identical to SEQ ID NO: 25465
  source 1..80: mol_type = other DNA

SEQ ID NO: 210196 - DNA, 80 bp, synthetic construct; identical to SEQ ID NO: 25466
  source 1..80: mol_type = other DNA

SEQ ID NO: 210197 - DNA, 80 bp, synthetic construct; identical to SEQ ID NO: 25467
  source 1..80: mol_type = other DNA

SEQ ID NO: 210198 - DNA, 80 bp, synthetic construct; identical to SEQ ID NO: 25468
  source 1..80: mol_type = other DNA

SEQ ID NO: 210199 - DNA, 80 bp, synthetic construct; identical to SEQ ID NO: 25469
  source 1..80: mol_type = other DNA

SEQ ID NO: 210200 - DNA, 80 bp, synthetic construct; identical to SEQ ID NO: 25470
  source 1..80: mol_type = other DNA

SEQ ID NO: 210201 - DNA, 80 bp, synthetic construct; identical to SEQ ID NO: 25471
  source 1..80: mol_type = other DNA

SEQ ID NO: 210202 - DNA, 80 bp, synthetic construct; identical to SEQ ID NO: 25472
  source 1..80: mol_type = other DNA

SEQ ID NO: 210203 - DNA, 80 bp, synthetic construct; identical to SEQ ID NO: 25473
  source 1..80: mol_type = other DNA

SEQ ID NO: 210204 - DNA, 80 bp, synthetic construct; identical to SEQ ID NO: 25474
  source 1..80: mol_type = other DNA

SEQ ID NO: 210205 - DNA, 80 bp, synthetic construct; identical to SEQ ID NO: 25475
  source 1..80: mol_type = other DNA

SEQ ID NO: 210206 - DNA, 80 bp, synthetic construct; identical to SEQ ID NO: 25476
  source 1..80: mol_type = other DNA

SEQ ID NO: 210207 - DNA, 80 bp, synthetic construct; identical to SEQ ID NO: 25477
  source 1..80: mol_type = other DNA

SEQ ID NO: 210208 - DNA, 80 bp, synthetic construct; identical to SEQ ID NO: 25478
  source 1..80: mol_type = other DNA

SEQ ID NO: 210209 - DNA, 80 bp, synthetic construct; identical to SEQ ID NO: 25479
  source 1..80: mol_type = other DNA

SEQ ID NO: 210210 - DNA, 80 bp, synthetic construct; identical to SEQ ID NO: 25480
  source 1..80: mol_type = other DNA

SEQ ID NO: 210211 - DNA, 80 bp, synthetic construct; identical to SEQ ID NO: 25481
  source 1..80: mol_type = other DNA

SEQ ID NO: 210212 - DNA, 80 bp, synthetic construct; identical to SEQ ID NO: 25482
  source 1..80: mol_type = other DNA

SEQ ID NO: 210213 - DNA, 80 bp, synthetic construct; identical to SEQ ID NO: 25483
  source 1..80: mol_type = other DNA

SEQ ID NO: 210214 - DNA, 80 bp, synthetic construct; identical to SEQ ID NO: 25484
  source 1..80: mol_type = other DNA

SEQ ID NO: 210215 - DNA, 80 bp, synthetic construct; identical to SEQ ID NO: 25485
  source 1..80: mol_type = other DNA

SEQ ID NO: 210216 - DNA, 80 bp, synthetic construct; identical to SEQ ID NO: 25486
  source 1..80: mol_type = other DNA

SEQ ID NO: 210217 - DNA, 80 bp, synthetic construct; identical to SEQ ID NO: 25487
  source 1..80: mol_type = other DNA

SEQ ID NO: 210218 - DNA, 80 bp, synthetic construct; identical to SEQ ID NO: 25488
  source 1..80: mol_type = other DNA

SEQ ID NO: 210219 - DNA, 80 bp, synthetic construct; identical to SEQ ID NO: 25489
  source 1..80: mol_type = other DNA

SEQ ID NO: 210220 - DNA, 80 bp, synthetic construct; identical to SEQ ID NO: 25490
  source 1..80: mol_type = other DNA

SEQ ID NO: 210221 - DNA, 80 bp, synthetic construct; identical to SEQ ID NO: 25491
  source 1..80: mol_type = other DNA

SEQ ID NO: 210222 - DNA, 80 bp, synthetic construct; identical to SEQ ID NO: 25492
  source 1..80: mol_type = other DNA

SEQ ID NO: 210223 - DNA, 80 bp, synthetic construct; identical to SEQ ID NO: 25493
  source 1..80: mol_type = other DNA

SEQ ID NO: 210224 - DNA, 80 bp, synthetic construct; identical to SEQ ID NO: 25494
  source 1..80: mol_type = other DNA

SEQ ID NO: 210225 - DNA, 80 bp, synthetic construct; identical to SEQ ID NO: 25495
  source 1..80: mol_type = other DNA

SEQ ID NO: 210226 - DNA, 80 bp, synthetic construct; identical to SEQ ID NO: 25496
  source 1..80: mol_type = other DNA

SEQ ID NO: 210227 - DNA, 80 bp, synthetic construct; identical to SEQ ID NO: 25497
  source 1..80: mol_type = other DNA

SEQ ID NO: 210228 - DNA, 80 bp, synthetic construct; identical to SEQ ID NO: 25498
  source 1..80: mol_type = other DNA

SEQ ID NO: 210229 - DNA, 80 bp, synthetic construct; identical to SEQ ID NO: 25499
  source 1..80: mol_type = other DNA

SEQ ID NO: 210230 - DNA, 80 bp, synthetic construct; identical to SEQ ID NO: 25500
  source 1..80: mol_type = other DNA

SEQ ID NO: 210231 - DNA, 80 bp, synthetic construct; identical to SEQ ID NO: 25501
  source 1..80: mol_type = other DNA

SEQ ID NO: 210232 - DNA, 80 bp, synthetic construct; identical to SEQ ID NO: 25502
  source 1..80: mol_type = other DNA

SEQ ID NO: 210233 - DNA, 80 bp, synthetic construct; identical to SEQ ID NO: 25503
  source 1..80: mol_type = other DNA

SEQ ID NO: 210234 - DNA, 80 bp, synthetic construct; identical to SEQ ID NO: 25504
  source 1..80: mol_type = other DNA

SEQ ID NO: 210235 - DNA, 80 bp, synthetic construct; identical to SEQ ID NO: 25505
  source 1..80: mol_type = other DNA

SEQ ID NO: 210236 - DNA, 80 bp, synthetic construct; identical to SEQ ID NO: 25506
  source 1..80: mol_type = other DNA

SEQ ID NO: 210237 - DNA, 80 bp, synthetic construct; identical to SEQ ID NO: 25507
  source 1..80: mol_type = other DNA

SEQ ID NO: 210238 - DNA, 80 bp, synthetic construct; identical to SEQ ID NO: 25508
  source 1..80: mol_type = other DNA

SEQ ID NO: 210239 - DNA, 80 bp, synthetic construct; identical to SEQ ID NO: 25509
  source 1..80: mol_type = other DNA

SEQ ID NO: 210240 - DNA, 80 bp, synthetic construct; identical to SEQ ID NO: 25510
  source 1..80: mol_type = other DNA

SEQ ID NO: 210241 - DNA, 80 bp, synthetic construct; identical to SEQ ID NO: 25511
  source 1..80: mol_type = other DNA

SEQ ID NO: 210242 - DNA, 80 bp, synthetic construct; identical to SEQ ID NO: 25512
  source 1..80: mol_type = other DNA

SEQ ID NO: 210243 - DNA, 80 bp, synthetic construct; identical to SEQ ID NO: 25513
  source 1..80: mol_type = other DNA

SEQ ID NO: 210244 - DNA, 80 bp, synthetic construct; identical to SEQ ID NO: 25514
  source 1..80: mol_type = other DNA

SEQ ID NO: 210245 - DNA, 80 bp, synthetic construct; identical to SEQ ID NO: 25515
  source 1..80: mol_type = other DNA

SEQ ID NO: 210246 - DNA, 80 bp, synthetic construct; identical to SEQ ID NO: 25516
  source 1..80: mol_type = other DNA

SEQ ID NO: 210247 - DNA, 80 bp, synthetic construct; identical to SEQ ID NO: 25517
  source 1..80: mol_type = other DNA

SEQ ID NO: 210248 - DNA, 80 bp, synthetic construct; identical to SEQ ID NO: 25518
  source 1..80: mol_type = other DNA

SEQ ID NO: 210249 - DNA, 80 bp, synthetic construct; identical to SEQ ID NO: 25519
  source 1..80: mol_type = other DNA

SEQ ID NO: 210250 - DNA, 80 bp, synthetic construct; identical to SEQ ID NO: 25520
  source 1..80: mol_type = other DNA

SEQ ID NO: 210251 - DNA, 80 bp, synthetic construct; identical to SEQ ID NO: 25521
  source 1..80: mol_type = other DNA

SEQ ID NO: 210252 - DNA, 80 bp, synthetic construct; identical to SEQ ID NO: 25522
  source 1..80: mol_type = other DNA

SEQ ID NO: 210253 - DNA, 80 bp, synthetic construct; identical to SEQ ID NO: 25523
  source 1..80: mol_type = other DNA

SEQ ID NO: 210254 - DNA, 80 bp, synthetic construct; identical to SEQ ID NO: 25524
  source 1..80: mol_type = other DNA

SEQ ID NO: 210255 - DNA, 80 bp, synthetic construct; identical to SEQ ID NO: 25525
  source 1..80: mol_type = other DNA

SEQ ID NO: 210256 - DNA, 80 bp, synthetic construct; identical to SEQ ID NO: 25526
  source 1..80: mol_type = other DNA

SEQ ID NO: 210257 - DNA, 80 bp, synthetic construct; identical to SEQ ID NO: 25527
  source 1..80: mol_type = other DNA

SEQ ID NO: 210258 - DNA, 80 bp, synthetic construct; identical to SEQ ID NO: 25528
  source 1..80: mol_type = other DNA

SEQ ID NO: 210259 - DNA, 80 bp, synthetic construct; identical to SEQ ID NO: 25529
  source 1..80: mol_type = other DNA

SEQ ID NO: 210260 - DNA, 80 bp, synthetic construct; identical to SEQ ID NO: 25530
  source 1..80: mol_type = other DNA

SEQ ID NO: 210261 - DNA, 80 bp, synthetic construct; identical to SEQ ID NO: 25531
  source 1..80: mol_type = other DNA

SEQ ID NO: 210262 - DNA, 80 bp, synthetic construct; identical to SEQ ID NO: 25532
  source 1..80: mol_type = other DNA

SEQ ID NO: 210263 - DNA, 80 bp, synthetic construct; identical to SEQ ID NO: 25533
  source 1..80: mol_type = other DNA

SEQ ID NO: 210264 - DNA, 80 bp, synthetic construct; identical to SEQ ID NO: 25534
  source 1..80: mol_type = other DNA

SEQ ID NO: 210265 - DNA, 80 bp, synthetic construct; identical to SEQ ID NO: 25535
  source 1..80: mol_type = other DNA

SEQ ID NO: 210266 - DNA, 80 bp, synthetic construct; identical to SEQ ID NO: 25536
  source 1..80: mol_type = other DNA

SEQ ID NO: 210267 - DNA, 80 bp, synthetic construct; identical to SEQ ID NO: 25537
  source 1..80: mol_type = other DNA

SEQ ID NO: 210268 - DNA, 80 bp, synthetic construct; identical to SEQ ID NO: 25538
  source 1..80: mol_type = other DNA

SEQ ID NO: 210269 - DNA, 80 bp, synthetic construct; identical to SEQ ID NO: 25539
  source 1..80: mol_type = other DNA

SEQ ID NO: 210270 - DNA, 80 bp, synthetic construct; identical to SEQ ID NO: 25540
  source 1..80: mol_type = other DNA

SEQ ID NO: 210271 - DNA, 80 bp, synthetic construct; identical to SEQ ID NO: 25541
  source 1..80: mol_type = other DNA

SEQ ID NO: 210272 - DNA, 80 bp, synthetic construct; identical to SEQ ID NO: 25542
  source 1..80: mol_type = other DNA

SEQ ID NO: 210273 - DNA, 80 bp, synthetic construct; identical to SEQ ID NO: 25543
  source 1..80: mol_type = other DNA

SEQ ID NO: 210274 - DNA, 80 bp, synthetic construct; identical to SEQ ID NO: 25544
  source 1..80: mol_type = other DNA

SEQ ID NO: 210275 - DNA, 80 bp, synthetic construct; identical to SEQ ID NO: 25545
  source 1..80: mol_type = other DNA

SEQ ID NO: 210276 - DNA, 80 bp, synthetic construct; identical to SEQ ID NO: 25546
  source 1..80: mol_type = other DNA

SEQ ID NO: 210277 - DNA, 80 bp, synthetic construct; identical to SEQ ID NO: 25547
  source 1..80: mol_type = other DNA

SEQ ID NO: 210278 - DNA, 80 bp, synthetic construct; identical to SEQ ID NO: 25548
  source 1..80: mol_type = other DNA

SEQ ID NO: 210279 - DNA, 80 bp, synthetic construct; identical to SEQ ID NO: 25549
  source 1..80: mol_type = other DNA

SEQ ID NO: 210280 - DNA, 80 bp, synthetic construct; identical to SEQ ID NO: 25550
  source 1..80: mol_type = other DNA

SEQ ID NO: 210281 - DNA, 80 bp, synthetic construct; identical to SEQ ID NO: 25551
  source 1..80: mol_type = other DNA

SEQ ID NO: 210282 - DNA, 80 bp, synthetic construct; identical to SEQ ID NO: 25552
  source 1..80: mol_type = other DNA

SEQ ID NO: 210283 - DNA, 80 bp, synthetic construct; identical to SEQ ID NO: 25553
  source 1..80: mol_type = other DNA

SEQ ID NO: 210284 - DNA, 80 bp, synthetic construct; identical to SEQ ID NO: 25554
  source 1..80: mol_type = other DNA

SEQ ID NO: 210285 - DNA, 80 bp, synthetic construct; identical to SEQ ID NO: 25555
  source 1..80: mol_type = other DNA

SEQ ID NO: 210286 - DNA, 80 bp, synthetic construct; identical to SEQ ID NO: 25556
  source 1..80: mol_type = other DNA

SEQ ID NO: 210287 - DNA, 80 bp, synthetic construct; identical to SEQ ID NO: 25557
  source 1..80: mol_type = other DNA

SEQ ID NO: 210288 - DNA, 80 bp, synthetic construct; identical to SEQ ID NO: 25558
  source 1..80: mol_type = other DNA

SEQ ID NO: 210289 - DNA, 80 bp, synthetic construct; identical to SEQ ID NO: 25559
  source 1..80: mol_type = other DNA

SEQ ID NO: 210290 - DNA, 80 bp, synthetic construct; identical to SEQ ID NO: 25560
  source 1..80: mol_type = other DNA

SEQ ID NO: 210291 - DNA, 80 bp, synthetic construct; identical to SEQ ID NO: 25561
  source 1..80: mol_type = other DNA

SEQ ID NO: 210292 - DNA, 80 bp, synthetic construct; identical to SEQ ID NO: 25562
  source 1..80: mol_type = other DNA

SEQ ID NO: 210293 - DNA, 80 bp, synthetic construct; identical to SEQ ID NO: 25563
  source 1..80: mol_type = other DNA

SEQ ID NO: 210294 - DNA, 80 bp, synthetic construct; identical to SEQ ID NO: 25564
  source 1..80: mol_type = other DNA

SEQ ID NO: 210295 - DNA, 80 bp, synthetic construct; identical to SEQ ID NO: 25565
  source 1..80: mol_type = other DNA

SEQ ID NO: 210296 - DNA, 80 bp, synthetic construct; identical to SEQ ID NO: 25566
  source 1..80: mol_type = other DNA

SEQ ID NO: 210297 - DNA, 80 bp, synthetic construct; identical to SEQ ID NO: 25567
  source 1..80: mol_type = other DNA

SEQ ID NO: 210298 - DNA, 80 bp, synthetic construct; identical to SEQ ID NO: 25568
  source 1..80: mol_type = other DNA

SEQ ID NO: 210299 - DNA, 80 bp, synthetic construct; identical to SEQ ID NO: 25569
  source 1..80: mol_type = other DNA

SEQ ID NO: 210300 - DNA, 80 bp, synthetic construct; identical to SEQ ID NO: 25570
  source 1..80: mol_type = other DNA

SEQ ID NO: 210301 - DNA, 80 bp, synthetic construct; identical to SEQ ID NO: 25571
  source 1..80: mol_type = other DNA

SEQ ID NO: 210302 - DNA, 80 bp, synthetic construct; identical to SEQ ID NO: 25572
  source 1..80: mol_type = other DNA

SEQ ID NO: 210303 - DNA, 80 bp, synthetic construct; identical to SEQ ID NO: 25573
  source 1..80: mol_type = other DNA

SEQ ID NO: 210304 - DNA, 80 bp, synthetic construct; identical to SEQ ID NO: 25574
  source 1..80: mol_type = other DNA

SEQ ID NO: 210305 - DNA, 80 bp, synthetic construct; identical to SEQ ID NO: 25575
  source 1..80: mol_type = other DNA

SEQ ID NO: 210306 - DNA, 80 bp, synthetic construct; identical to SEQ ID NO: 25576
  source 1..80: mol_type = other DNA

SEQ ID NO: 210307 - DNA, 80 bp, synthetic construct; identical to SEQ ID NO: 25577
  source 1..80: mol_type = other DNA

SEQ ID NO: 210308 - DNA, 80 bp, synthetic construct; identical to SEQ ID NO: 25578
  source 1..80: mol_type = other DNA

SEQ ID NO: 210309 - DNA, 80 bp, synthetic construct; identical to SEQ ID NO: 25579
  source 1..80: mol_type = other DNA

SEQ ID NO: 210310 - DNA, 80 bp, synthetic construct; identical to SEQ ID NO: 25580
  source 1..80: mol_type = other DNA

SEQ ID NO: 210311 - DNA, 80 bp, synthetic construct; identical to SEQ ID NO: 25581
  source 1..80: mol_type = other DNA

SEQ ID NO: 210312 - DNA, 80 bp, synthetic construct; identical to SEQ ID NO: 25582
  source 1..80: mol_type = other DNA

SEQ ID NO: 210313 - DNA, 80 bp, synthetic construct; identical to SEQ ID NO: 25583
  source 1..80: mol_type = other DNA

SEQ ID NO: 210314 - DNA, 80 bp, synthetic construct; identical to SEQ ID NO: 25584
  source 1..80: mol_type = other DNA

SEQ ID NO: 210315 - DNA, 80 bp, synthetic construct; identical to SEQ ID NO: 25585
  source 1..80: mol_type = other DNA

SEQ ID NO: 210316 - DNA, 80 bp, synthetic construct; identical to SEQ ID NO: 25586
  source 1..80: mol_type = other DNA

SEQ ID NO: 210317 - DNA, 80 bp, synthetic construct; identical to SEQ ID NO: 25587
  source 1..80: mol_type = other DNA

SEQ ID NO: 210318 - DNA, 80 bp, synthetic construct; identical to SEQ ID NO: 25588
  source 1..80: mol_type = other DNA

SEQ ID NO: 210319 - DNA, 80 bp, synthetic construct; identical to SEQ ID NO: 25589
  source 1..80: mol_type = other DNA

SEQ ID NO: 210320 - DNA, 80 bp, synthetic construct; identical to SEQ ID NO: 25590
  source 1..80: mol_type = other DNA

SEQ ID NO: 210321 - DNA, 80 bp, synthetic construct; identical to SEQ ID NO: 25591
  source 1..80: mol_type = other DNA

SEQ ID NO: 210322 - DNA, 80 bp, synthetic construct; identical to SEQ ID NO: 25592
  source 1..80: mol_type = other DNA

SEQ ID NO: 210323 - DNA, 80 bp, synthetic construct; identical to SEQ ID NO: 25593
  source 1..80: mol_type = other DNA

SEQ ID NO: 210324 - DNA, 80 bp, synthetic construct; identical to SEQ ID NO: 25594
  source 1..80: mol_type = other DNA

SEQ ID NO: 210325 - DNA, 80 bp, synthetic construct; identical to SEQ ID NO: 25595
  source 1..80: mol_type = other DNA

SEQ ID NO: 210326 - DNA, 80 bp, synthetic construct; identical to SEQ ID NO: 25596
  source 1..80: mol_type = other DNA

SEQ ID NO: 210327 - DNA, 80 bp, synthetic construct; identical to SEQ ID NO: 25597
  source 1..80: mol_type = other DNA

SEQ ID NO: 210328 - DNA, 80 bp, synthetic construct; identical to SEQ ID NO: 25598
  source 1..80: mol_type = other DNA

SEQ ID NO: 210329 - DNA, 80 bp, synthetic construct; identical to SEQ ID NO: 25599
  source 1..80: mol_type = other DNA

SEQ ID NO: 210330 - DNA, 80 bp, synthetic construct; identical to SEQ ID NO: 25600
  source 1..80: mol_type = other DNA

SEQ ID NO: 210331 - DNA, 80 bp, synthetic construct; identical to SEQ ID NO: 25601
  source 1..80: mol_type = other DNA

SEQ ID NO: 210332 - DNA, 80 bp, synthetic construct; identical to SEQ ID NO: 25602
  source 1..80: mol_type = other DNA

SEQ ID NO: 210333 - DNA, 80 bp, synthetic construct; identical to SEQ ID NO: 25603
  source 1..80: mol_type = other DNA

SEQ ID NO: 210334 - DNA, 80 bp, synthetic construct; identical to SEQ ID NO: 25604
  source 1..80: mol_type = other DNA

SEQ ID NO: 210335 - DNA, 80 bp, synthetic construct; identical to SEQ ID NO: 25605
  source 1..80: mol_type = other DNA

SEQ ID NO: 210336 - DNA, 80 bp, synthetic construct; identical to SEQ ID NO: 25606
  source 1..80: mol_type = other DNA

SEQ ID NO: 210337 - DNA, 80 bp, synthetic construct; identical to SEQ ID NO: 25607
  source 1..80: mol_type = other DNA

SEQ ID NO: 210338 - DNA, 80 bp, synthetic construct; identical to SEQ ID NO: 25608
  source 1..80: mol_type = other DNA

SEQ ID NO: 210339 - DNA, 80 bp, synthetic construct; identical to SEQ ID NO: 25609
  source 1..80: mol_type = other DNA

SEQ ID NO: 210340 - DNA, 80 bp, synthetic construct; identical to SEQ ID NO: 25610
  source 1..80: mol_type = other DNA

SEQ ID NO: 210341 - DNA, 80 bp, synthetic construct; identical to SEQ ID NO: 25611
  source 1..80: mol_type = other DNA

SEQ ID NO: 210342 - DNA, 80 bp, synthetic construct; identical to SEQ ID NO: 25612
  source 1..80: mol_type = other DNA

SEQ ID NO: 210343 - DNA, 80 bp, synthetic construct; identical to SEQ ID NO: 25613
  source 1..80: mol_type = other DNA

SEQ ID NO: 210344 - DNA, 80 bp, synthetic construct; identical to SEQ ID NO: 25614
  source 1..80: mol_type = other DNA

SEQ ID NO: 210345 - DNA, 80 bp, synthetic construct; identical to SEQ ID NO: 25615
  source 1..80: mol_type = other DNA

SEQ ID NO: 210346 - DNA, 80 bp, synthetic construct; identical to SEQ ID NO: 25616
  source 1..80: mol_type = other DNA

SEQ ID NO: 210347 - DNA, 80 bp, synthetic construct; identical to SEQ ID NO: 25617
  source 1..80: mol_type = other DNA

SEQ ID NO: 210348 - DNA, 80 bp, synthetic construct; identical to SEQ ID NO: 25618
  source 1..80: mol_type = other DNA

SEQ ID NO: 210349 - DNA, 80 bp, synthetic construct; identical to SEQ ID NO: 25619
  source 1..80: mol_type = other DNA

SEQ ID NO: 210350 - DNA, 80 bp, synthetic construct; identical to SEQ ID NO: 25620
  source 1..80: mol_type = other DNA

SEQ ID NO: 210351 - DNA, 80 bp, synthetic construct; identical to SEQ ID NO: 25621
  source 1..80: mol_type = other DNA

SEQ ID NO: 210352 - DNA, 80 bp, synthetic construct; identical to SEQ ID NO: 25622
  source 1..80: mol_type = other DNA

SEQ ID NO: 210353 - DNA, 80 bp, synthetic construct; identical to SEQ ID NO: 25623
  source 1..80: mol_type = other DNA

SEQ ID NO: 210354 - DNA, 80 bp, synthetic construct; identical to SEQ ID NO: 25624
  source 1..80: mol_type = other DNA

SEQ ID NO: 210355 - DNA, 80 bp, synthetic construct; identical to SEQ ID NO: 25625
  source 1..80: mol_type = other DNA

SEQ ID NO: 210356 - DNA, 80 bp, synthetic construct; identical to SEQ ID NO: 25626
  source 1..80: mol_type = other DNA

SEQ ID NO: 210357 - DNA, 80 bp, synthetic construct; identical to SEQ ID NO: 25627
  source 1..80: mol_type = other DNA

SEQ ID NO: 210358 - DNA, 80 bp, synthetic construct; identical to SEQ ID NO: 25628
  source 1..80: mol_type = other DNA

SEQ ID NO: 210359 - DNA, 80 bp, synthetic construct; identical to SEQ ID NO: 25629
  source 1..80: mol_type = other DNA

SEQ ID NO: 210360 - DNA, 80 bp, synthetic construct; identical to SEQ ID NO: 25630
  source 1..80: mol_type = other DNA

SEQ ID NO: 210361 - DNA, 80 bp, synthetic construct; identical to SEQ ID NO: 25631
  source 1..80: mol_type = other DNA

SEQ ID NO: 210362 - DNA, 80 bp, synthetic construct; identical to SEQ ID NO: 25632
  source 1..80: mol_type = other DNA

SEQ ID NO: 210363 - DNA, 80 bp, synthetic construct; identical to SEQ ID NO: 25633
  source 1..80: mol_type = other DNA

SEQ ID NO: 210364 - DNA, 80 bp, synthetic construct; identical to SEQ ID NO: 25634
  source 1..80: mol_type = other DNA

SEQ ID NO: 210365 - DNA, 80 bp, synthetic construct; identical to SEQ ID NO: 25635
  source 1..80: mol_type = other DNA

SEQ ID NO: 210366 - DNA, 80 bp, synthetic construct; identical to SEQ ID NO: 25636
  source 1..80: mol_type = other DNA

SEQ ID NO: 210367 - DNA, 80 bp, synthetic construct; identical to SEQ ID NO: 25637
  source 1..80: mol_type = other DNA

SEQ ID NO: 210368 - DNA, 80 bp, synthetic construct; identical to SEQ ID NO: 25638
  source 1..80: mol_type = other DNA

SEQ ID NO: 210369 - DNA, 80 bp, synthetic construct; identical to SEQ ID NO: 25639
  source 1..80: mol_type = other DNA

SEQ ID NO: 210370 - DNA, 80 bp, synthetic construct; identical to SEQ ID NO: 25640
  source 1..80: mol_type = other DNA

SEQ ID NO: 210371 - DNA, 80 bp, synthetic construct; identical to SEQ ID NO: 25641
  source 1..80: mol_type = other DNA

SEQ ID NO: 210372 - DNA, 80 bp, synthetic construct; identical to SEQ ID NO: 25642
  source 1..80: mol_type = other DNA

SEQ ID NO: 210373 - DNA, 80 bp, synthetic construct; identical to SEQ ID NO: 25643
  source 1..80: mol_type = other DNA

SEQ ID NO: 210374 - DNA, 80 bp, synthetic construct; identical to SEQ ID NO: 25644
  source 1..80: mol_type = other DNA

SEQ ID NO: 210375 - DNA, 80 bp, synthetic construct; identical to SEQ ID NO: 25645
  source 1..80: mol_type = other DNA

SEQ ID NO: 210376 - DNA, 80 bp, synthetic construct; identical to SEQ ID NO: 25646
  source 1..80: mol_type = other DNA

SEQ ID NO: 210377 - DNA, 80 bp, synthetic construct; identical to SEQ ID NO: 25647
  source 1..80: mol_type = other DNA

SEQ ID NO: 210378 - DNA, 80 bp, synthetic construct; identical to SEQ ID NO: 25648
  source 1..80: mol_type = other DNA

SEQ ID NO: 210379 - DNA, 80 bp, synthetic construct; identical to SEQ ID NO: 25649
  source 1..80: mol_type = other DNA

SEQ ID NO: 210380 - DNA, 80 bp, synthetic construct; identical to SEQ ID NO: 25650
  source 1..80: mol_type = other DNA

SEQ ID NO: 210381 - DNA, 80 bp, synthetic construct; identical to SEQ ID NO: 25651
  source 1..80: mol_type = other DNA

SEQ ID NO: 210382 - DNA, 80 bp, synthetic construct; identical to SEQ ID NO: 25652
  source 1..80: mol_type = other DNA

SEQ ID NO: 210383 - DNA, 80 bp, synthetic construct; identical to SEQ ID NO: 25653
  source 1..80: mol_type = other DNA

SEQ ID NO: 210384 - DNA, 80 bp, synthetic construct; identical to SEQ ID NO: 25654
  source 1..80: mol_type = other DNA

SEQ ID NO: 210385 - DNA, 80 bp, synthetic construct; identical to SEQ ID NO: 25655
  source 1..80: mol_type = other DNA

SEQ ID NO: 210386 - DNA, 80 bp, synthetic construct; identical to SEQ ID NO: 25656
  source 1..80: mol_type = other DNA

SEQ ID NO: 210387 - DNA, 80 bp, synthetic construct; identical to SEQ ID NO: 25657
  source 1..80: mol_type = other DNA

SEQ ID NO: 210388 - DNA, 80 bp, synthetic construct; identical to SEQ ID NO: 25658
  source 1..80: mol_type = other DNA

SEQ ID NO: 210389 - DNA, 80 bp, synthetic construct; identical to SEQ ID NO: 25659
  source 1..80: mol_type = other DNA

SEQ ID NO: 210390 - DNA, 80 bp, synthetic construct; identical to SEQ ID NO: 25660
  source 1..80: mol_type = other DNA

SEQ ID NO: 210391 - DNA, 80 bp, synthetic construct; identical to SEQ ID NO: 25661
  source 1..80: mol_type = other DNA

SEQ ID NO: 210392 - DNA, 80 bp, synthetic construct; identical to SEQ ID NO: 25662
  source 1..80: mol_type = other DNA

SEQ ID NO: 210393 - DNA, 80 bp, synthetic construct; identical to SEQ ID NO: 25663
  source 1..80: mol_type = other DNA

SEQ ID NO: 210394 - DNA, 80 bp, synthetic construct; identical to SEQ ID NO: 25664
  source 1..80: mol_type = other DNA

SEQ ID NO: 210395 - DNA, 80 bp, synthetic construct; identical to SEQ ID NO: 25665
  source 1..80: mol_type = other DNA

SEQ ID NO: 210396 - DNA, 80 bp, synthetic construct; identical to SEQ ID NO: 25666
  source 1..80: mol_type = other DNA

SEQ ID NO: 210397 - DNA, 80 bp, synthetic construct; identical to SEQ ID NO: 25667
  source 1..80: mol_type = other DNA

SEQ ID NO: 210398 - DNA, 80 bp, synthetic construct; identical to SEQ ID NO: 25668
  source 1..80: mol_type = other DNA

SEQ ID NO: 210399 - DNA, 80 bp, synthetic construct; identical to SEQ ID NO: 25669
  source 1..80: mol_type = other DNA

SEQ ID NO: 210400 - DNA, 80 bp, synthetic construct; identical to SEQ ID NO: 25670
  source 1..80: mol_type = other DNA

SEQ ID NO: 210401 - DNA, 80 bp, synthetic construct; identical to SEQ ID NO: 25671
  source 1..80: mol_type = other DNA

SEQ ID NO: 210402 - DNA, 80 bp, synthetic construct; identical to SEQ ID NO: 25672
  source 1..80: mol_type = other DNA

SEQ ID NO: 210403 - DNA, 80 bp, synthetic construct; identical to SEQ ID NO: 25673
  source 1..80: mol_type = other DNA

SEQ ID NO: 210404 - DNA, 80 bp, synthetic construct; identical to SEQ ID NO: 25674
  source 1..80: mol_type = other DNA

SEQ ID NO: 210405 - DNA, 80 bp, synthetic construct; identical to SEQ ID NO: 25675
  source 1..80: mol_type = other DNA

SEQ ID NO: 210406 - DNA, 80 bp, synthetic construct; identical to SEQ ID NO: 25676
  source 1..80: mol_type = other DNA

SEQ ID NO: 210407 - DNA, 80 bp, synthetic construct; identical to SEQ ID NO: 25677
  source 1..80: mol_type = other DNA

SEQ ID NO: 210408 - DNA, 80 bp, synthetic construct; identical to SEQ ID NO: 25678
  source 1..80: mol_type = other DNA

SEQ ID NO: 210409 - DNA, 80 bp, synthetic construct; identical to SEQ ID NO: 25679
  source 1..80: mol_type = other DNA

SEQ ID NO: 210410 - DNA, 80 bp, synthetic construct; identical to SEQ ID NO: 25680
  source 1..80: mol_type = other DNA

SEQ ID NO: 210411 - DNA, 80 bp, synthetic construct; identical to SEQ ID NO: 25681
  source 1..80: mol_type = other DNA

SEQ ID NO: 210412 - DNA, 80 bp, synthetic construct; identical to SEQ ID NO: 25682
  source 1..80: mol_type = other DNA

SEQ ID NO: 210413 - DNA, 80 bp, synthetic construct; identical to SEQ ID NO: 25683
  source 1..80: mol_type = other DNA

SEQ ID NO: 210414 - DNA, 80 bp, synthetic construct; identical to SEQ ID NO: 25684
  source 1..80: mol_type = other DNA

SEQ ID NO: 210415 - DNA, 80 bp, synthetic construct; identical to SEQ ID NO: 25685
  source 1..80: mol_type = other DNA

SEQ ID NO: 210416 - DNA, 80 bp, synthetic construct; identical to SEQ ID NO: 25686
  source 1..80: mol_type = other DNA

SEQ ID NO: 210417 - DNA, 80 bp, synthetic construct; identical to SEQ ID NO: 25687
  source 1..80: mol_type = other DNA

SEQ ID NO: 210418 - DNA, 80 bp, synthetic construct; identical to SEQ ID NO: 25688
  source 1..80: mol_type = other DNA

SEQ ID NO: 210419 - DNA, 80 bp, synthetic construct; identical to SEQ ID NO: 25689
  source 1..80: mol_type = other DNA

SEQ ID NO: 210420 - DNA, 80 bp, synthetic construct; identical to SEQ ID NO: 25690
  source 1..80: mol_type = other DNA

SEQ ID NO: 210421 - DNA, 80 bp, synthetic construct; identical to SEQ ID NO: 25691
  source 1..80: mol_type = other DNA

SEQ ID NO: 210422 - DNA, 80 bp, synthetic construct; identical to SEQ ID NO: 25692
  source 1..80: mol_type = other DNA

SEQ ID NO: 210423 - DNA, 80 bp, synthetic construct; identical to SEQ ID NO: 25693
  source 1..80: mol_type = other DNA

SEQ ID NO: 210424 - DNA, 80 bp, synthetic construct; identical to SEQ ID NO: 25694
  source 1..80: mol_type = other DNA

SEQ ID NO: 210425 - DNA, 80 bp, synthetic construct; identical to SEQ ID NO: 25695
  source 1..80: mol_type = other DNA

SEQ ID NO: 210426 - DNA, 80 bp, synthetic construct; identical to SEQ ID NO: 25696
  source 1..80: mol_type = other DNA

SEQ ID NO: 210427 - DNA, 80 bp, synthetic construct; identical to SEQ ID NO: 25697
  source 1..80: mol_type = other DNA

SEQ ID NO: 210428 - DNA, 80 bp, synthetic construct; identical to SEQ ID NO: 25698
  source 1..80: mol_type = other DNA

SEQ ID NO: 210429 - DNA, 80 bp, synthetic construct; identical to SEQ ID NO: 25699
  source 1..80: mol_type = other DNA

SEQ ID NO: 210430 - DNA, 80 bp, synthetic construct; identical to SEQ ID NO: 25700
  source 1..80: mol_type = other DNA

SEQ ID NO: 210431 - DNA, 80 bp, synthetic construct; identical to SEQ ID NO: 25701
  source 1..80: mol_type = other DNA

SEQ ID NO: 210432 - DNA, 80 bp, synthetic construct; identical to SEQ ID NO: 25702
  source 1..80: mol_type = other DNA

SEQ ID NO: 210433 - DNA, 80 bp, synthetic construct; identical to SEQ ID NO: 25703
  source 1..80: mol_type = other DNA

SEQ ID NO: 210434 - DNA, 80 bp, synthetic construct; identical to SEQ ID NO: 25704
  source 1..80: mol_type = other DNA

SEQ ID NO: 210435 - DNA, 80 bp, synthetic construct; identical to SEQ ID NO: 25705
  source 1..80: mol_type = other DNA

SEQ ID NO: 210436 - DNA, 80 bp, synthetic construct; identical to SEQ ID NO: 25706
  source 1..80: mol_type = other DNA

SEQ ID NO: 210437 - DNA, 80 bp, synthetic construct; identical to SEQ ID NO: 25707
  source 1..80: mol_type = other DNA

SEQ ID NO: 210438 - DNA, 80 bp, synthetic construct; identical to SEQ ID NO: 25708
  source 1..80: mol_type = other DNA

SEQ ID NO: 210439 - DNA, 80 bp, synthetic construct; identical to SEQ ID NO: 25709
  source 1..80: mol_type = other DNA

SEQ ID NO: 210440 - DNA, 80 bp, synthetic construct; identical to SEQ ID NO: 25710
  source 1..80: mol_type = other DNA

SEQ ID NO: 210441 - DNA, 80 bp, synthetic construct; identical to SEQ ID NO: 25711
  source 1..80: mol_type = other DNA

SEQ ID NO: 210442 - DNA, 80 bp, synthetic construct; identical to SEQ ID NO: 25712
  source 1..80: mol_type = other DNA

SEQ ID NO: 210443 - DNA, 80 bp, synthetic construct; identical to SEQ ID NO: 25713
  source 1..80: mol_type = other DNA

SEQ ID NO: 210444 - DNA, 80 bp, synthetic construct; identical to SEQ ID NO: 25714
  source 1..80: mol_type = other DNA

SEQ ID NO: 210445 - DNA, 80 bp, synthetic construct; identical to SEQ ID NO: 25715
  source 1..80: mol_type = other DNA

SEQ ID NO: 210446 - DNA, 80 bp, synthetic construct; identical to SEQ ID NO: 25716
  source 1..80: mol_type = other DNA

SEQ ID NO: 210447 - DNA, 80 bp, synthetic construct; identical to SEQ ID NO: 25717
  source 1..80: mol_type = other DNA

SEQ ID NO: 210448 - DNA, 80 bp, synthetic construct; identical to SEQ ID NO: 25718
  source 1..80: mol_type = other DNA

SEQ ID NO: 210449 - DNA, 80 bp, synthetic construct; identical to SEQ ID NO: 25719
  source 1..80: mol_type = other DNA

SEQ ID NO: 210450 - DNA, 80 bp, synthetic construct; identical to SEQ ID NO: 25720
  source 1..80: mol_type = other DNA

SEQ ID NO: 210451 - DNA, 80 bp, synthetic construct; identical to SEQ ID NO: 25721
  source 1..80: mol_type = other DNA

SEQ ID NO: 210452 - DNA, 80 bp, synthetic construct; identical to SEQ ID NO: 25722
  source 1..80: mol_type = other DNA

SEQ ID NO: 210453 - DNA, 80 bp, synthetic construct; identical to SEQ ID NO: 25723
  source 1..80: mol_type = other DNA

SEQ ID NO: 210454 - DNA, 80 bp, synthetic construct; identical to SEQ ID NO: 25724
  source 1..80: mol_type = other DNA

SEQ ID NO: 210455 - DNA, 80 bp, synthetic construct; identical to SEQ ID NO: 25725
  source 1..80: mol_type = other DNA

SEQ ID NO: 210456 - DNA, 80 bp, synthetic construct; identical to SEQ ID NO: 25726
  source 1..80: mol_type = other DNA

SEQ ID NO: 210457 - DNA, 80 bp, synthetic construct; identical to SEQ ID NO: 25727
  source 1..80: mol_type = other DNA

SEQ ID NO: 210458 - DNA, 80 bp, synthetic construct; identical to SEQ ID NO: 25728
  source 1..80: mol_type = other DNA

SEQ ID NO: 210459 - DNA, 80 bp, synthetic construct; identical to SEQ ID NO: 25729
  source 1..80: mol_type = other DNA

SEQ ID NO: 210460 - DNA, 80 bp, synthetic construct; identical to SEQ ID NO: 25730
  source 1..80: mol_type = other DNA

SEQ ID NO: 210461 - DNA, 80 bp, synthetic construct; identical to SEQ ID NO: 25731
  source 1..80: mol_type = other DNA

SEQ ID NO: 210462 - DNA, 80 bp, synthetic construct; identical to SEQ ID NO: 25732
  source 1..80: mol_type = other DNA

SEQ ID NO: 210463 - DNA, 80 bp, synthetic construct; identical to SEQ ID NO: 25733
  source 1..80: mol_type = other DNA

SEQ ID NO: 210464 - DNA, 80 bp, synthetic construct; identical to SEQ ID NO: 25734
  source 1..80: mol_type = other DNA

SEQ ID NO: 210465 - DNA, 80 bp, synthetic construct; identical to SEQ ID NO: 25735
  source 1..80: mol_type = other DNA

SEQ ID NO: 210466 - DNA, 80 bp, synthetic construct; identical to SEQ ID NO: 25736
  source 1..80: mol_type = other DNA

SEQ ID NO: 210467 - DNA, 80 bp, synthetic construct; identical to SEQ ID NO: 25737
  source 1..80: mol_type = other DNA

SEQ ID NO: 210468 - DNA, 80 bp, synthetic construct; identical to SEQ ID NO: 25738
  source 1..80: mol_type = other DNA

SEQ ID NO: 210469 - DNA, 80 bp, synthetic construct; identical to SEQ ID NO: 25739
  source 1..80: mol_type = other DNA

SEQ ID NO: 210470 - DNA, 80 bp, synthetic construct; identical to SEQ ID NO: 25740
  source 1..80: mol_type = other DNA

SEQ ID NO: 210471 - DNA, 80 bp, synthetic construct; identical to SEQ ID NO: 25741
  source 1..80: mol_type = other DNA

SEQ ID NO: 210472 - DNA, 80 bp, synthetic construct; identical to SEQ ID NO: 25742
  source 1..80: mol_type = other DNA

SEQ ID NO: 210473 - DNA, 80 bp, synthetic construct; identical to SEQ ID NO: 25743
  source 1..80: mol_type = other DNA

SEQ ID NO: 210474 - DNA, 80 bp, synthetic construct; identical to SEQ ID NO: 25744
  source 1..80: mol_type = other DNA

SEQ ID NO: 210475 - DNA, 80 bp, synthetic construct; identical to SEQ ID NO: 25745
  source 1..80: mol_type = other DNA

SEQ ID NO: 210476 - DNA, 80 bp, synthetic construct; identical to SEQ ID NO: 25746
  source 1..80: mol_type = other DNA

SEQ ID NO: 210477 - DNA, 80 bp, synthetic construct; identical to SEQ ID NO: 25747
  source 1..80: mol_type = other DNA

SEQ ID NO: 210478 - DNA, 80 bp, synthetic construct; identical to SEQ ID NO: 25748
  source 1..80: mol_type = other DNA

SEQ ID NO: 210479 - DNA, 80 bp, synthetic construct; identical to SEQ ID NO: 25749
  source 1..80: mol_type = other DNA

SEQ ID NO: 210480 - DNA, 80 bp, synthetic construct; identical to SEQ ID NO: 25750
  source 1..80: mol_type = other DNA

SEQ ID NO: 210481 - DNA, 80 bp, synthetic construct; identical to SEQ ID NO: 25751
  source 1..80: mol_type = other DNA

SEQ ID NO: 210482 - DNA, 80 bp, synthetic construct; identical to SEQ ID NO: 25752
  source 1..80: mol_type = other DNA

SEQ ID NO: 210483 - DNA, 80 bp, synthetic construct; identical to SEQ ID NO: 25753
  source 1..80: mol_type = other DNA

SEQ ID NO: 210484 - DNA, 80 bp, synthetic construct; identical to SEQ ID NO: 25754
  source 1..80: mol_type = other DNA

SEQ ID NO: 210485 - DNA, 80 bp, synthetic construct; identical to SEQ ID NO: 25755
  source 1..80: mol_type = other DNA

SEQ ID NO: 210486 - DNA, 80 bp, synthetic construct; identical to SEQ ID NO: 25756
  source 1..80: mol_type = other DNA

SEQ ID NO: 210487 - DNA, 80 bp, synthetic construct; identical to SEQ ID NO: 25757
  source 1..80: mol_type = other DNA

SEQ ID NO: 210488 - DNA, 80 bp, synthetic construct; identical to SEQ ID NO: 25758
  source 1..80: mol_type = other DNA

SEQ ID NO: 210489 - DNA, 80 bp, synthetic construct; identical to SEQ ID NO: 25759
  source 1..80: mol_type = other DNA

SEQ ID NO: 210490 - DNA, 80 bp, synthetic construct; identical to SEQ ID NO: 25760
  source 1..80: mol_type = other DNA

SEQ ID NO: 210491 - DNA, 80 bp, synthetic construct; identical to SEQ ID NO: 25761
  source 1..80: mol_type = other DNA

SEQ ID NO: 210492 - DNA, 80 bp, synthetic construct; identical to SEQ ID NO: 25762
  source 1..80: mol_type = other DNA

SEQ ID NO: 210493 - DNA, 80 bp, synthetic construct; identical to SEQ ID NO: 25763
  source 1..80: mol_type = other DNA

SEQ ID NO: 210494 - DNA, 80 bp, synthetic construct; identical to SEQ ID NO: 25764
  source 1..80: mol_type = other DNA

SEQ ID NO: 210495 - DNA, 80 bp, synthetic construct; identical to SEQ ID NO: 25765
  source 1..80: mol_type = other DNA

SEQ ID NO: 210496 - DNA, 80 bp, synthetic construct; identical to SEQ ID NO: 25766
  source 1..80: mol_type = other DNA

SEQ ID NO: 210497 - DNA, 80 bp, synthetic construct; identical to SEQ ID NO: 25767
  source 1..80: mol_type = other DNA

SEQ ID NO: 210498 - DNA, 80 bp, synthetic construct; identical to SEQ ID NO: 25768
  source 1..80: mol_type = other DNA

SEQ ID NO: 210499 - DNA, 80 bp, synthetic construct; identical to SEQ ID NO: 25769
  source 1..80: mol_type = other DNA

SEQ ID NO: 210500 - DNA, 80 bp, synthetic construct; identical to SEQ ID NO: 25770
  source 1..80: mol_type = other DNA

SEQ ID NO: 210501 - DNA, 80 bp, synthetic construct; identical to SEQ ID NO: 25771
  source 1..80: mol_type = other DNA

SEQ ID NO: 210502 - DNA, 80 bp, synthetic construct; identical to SEQ ID NO: 25772
  source 1..80: mol_type = other DNA

SEQ ID NO: 210503 - DNA, 80 bp, synthetic construct; identical to SEQ ID NO: 25773
  source 1..80: mol_type = other DNA

SEQ ID NO: 210504 - DNA, 80 bp, synthetic construct; identical to SEQ ID NO: 25774
  source 1..80: mol_type = other DNA

SEQ ID NO: 210505 - DNA, 80 bp, synthetic construct; identical to SEQ ID NO: 25775
  source 1..80: mol_type = other DNA

SEQ ID NO: 210506 - DNA, 80 bp, synthetic construct; identical to SEQ ID NO: 25776
  source 1..80: mol_type = other DNA

SEQ ID NO: 210507 - DNA, 80 bp, synthetic construct; identical to SEQ ID NO: 25777
  source 1..80: mol_type = other DNA

SEQ ID NO: 210508 - DNA, 80 bp, synthetic construct; identical to SEQ ID NO: 25778
  source 1..80: mol_type = other DNA

SEQ ID NO: 210509 - DNA, 80 bp, synthetic construct; identical to SEQ ID NO: 25779
  source 1..80: mol_type = other DNA

SEQ ID NO: 210510 - DNA, 80 bp, synthetic construct; identical to SEQ ID NO: 25780
  source 1..80: mol_type = other DNA

SEQ ID NO: 210511 - DNA, 80 bp, synthetic construct; identical to SEQ ID NO: 25781
  source 1..80: mol_type = other DNA

SEQ ID NO: 210512 - DNA, 80 bp, synthetic construct; identical to SEQ ID NO: 25782
  source 1..80: mol_type = other DNA

SEQ ID NO: 210513 - DNA, 80 bp, synthetic construct; identical to SEQ ID NO: 25783
  source 1..80: mol_type = other DNA

SEQ ID NO: 210514 - DNA, 80 bp, synthetic construct; identical to SEQ ID NO: 25784
  source 1..80: mol_type = other DNA

SEQ ID NO: 210515 - DNA, 80 bp, synthetic construct; identical to SEQ ID NO: 25785
  source 1..80: mol_type = other DNA

SEQ ID NO: 210516 - DNA, 80 bp, synthetic construct; identical to SEQ ID NO: 25786
  source 1..80: mol_type = other DNA

SEQ ID NO: 210517 - DNA, 80 bp, synthetic construct; identical to SEQ ID NO: 25787
  source 1..80: mol_type = other DNA

SEQ ID NO: 210518 - DNA, 80 bp, synthetic construct; identical to SEQ ID NO: 25788
  source 1..80: mol_type = other DNA

SEQ ID NO: 210519 - DNA, 80 bp, synthetic construct; identical to SEQ ID NO: 25789
  source 1..80: mol_type = other DNA

SEQ ID NO: 210520 - DNA, 80 bp, synthetic construct; identical to SEQ ID NO: 25790
  source 1..80: mol_type = other DNA

SEQ ID NO: 210521 - DNA, 80 bp, synthetic construct; identical to SEQ ID NO: 25791
  source 1..80: mol_type = other DNA

SEQ ID NO: 210522 - DNA, 80 bp, synthetic construct; identical to SEQ ID NO: 25792
  source 1..80: mol_type = other DNA

SEQ ID NO: 210523 - DNA, 80 bp, synthetic construct; identical to SEQ ID NO: 25793
  source 1..80: mol_type = other DNA

SEQ ID NO: 210524 - DNA, 80 bp, synthetic construct; identical to SEQ ID NO: 25794
  source 1..80: mol_type = other DNA

SEQ ID NO: 210525 - DNA, 80 bp, synthetic construct; identical to SEQ ID NO: 25795
  source 1..80: mol_type = other DNA

SEQ ID NO: 210526 - DNA, 80 bp, synthetic construct; identical to SEQ ID NO: 25796
  source 1..80: mol_type = other DNA

SEQ ID NO: 210527 - DNA, 80 bp, synthetic construct; identical to SEQ ID NO: 25797
  source 1..80: mol_type = other DNA

SEQ ID NO: 210528 - DNA, 80 bp, synthetic construct; identical to SEQ ID NO: 25798
  source 1..80: mol_type = other DNA

SEQ ID NO: 210529 - DNA, 80 bp, synthetic construct; identical to SEQ ID NO: 25799
  source 1..80: mol_type = other DNA

SEQ ID NO: 210530 - DNA, 80 bp, synthetic construct; identical to SEQ ID NO: 25800
  source 1..80: mol_type = other DNA

SEQ ID NO: 210531 - DNA, 80 bp, synthetic construct; identical to SEQ ID NO: 25801
  source 1..80: mol_type = other DNA

SEQ ID NO: 210532 - DNA, 80 bp, synthetic construct; identical to SEQ ID NO: 25802
  source 1..80: mol_type = other DNA

SEQ ID NO: 210533 - DNA, 80 bp, synthetic construct; identical to SEQ ID NO: 25803
  source 1..80: mol_type = other DNA

SEQ ID NO: 210534 - DNA, 80 bp, synthetic construct; identical to SEQ ID NO: 25804
  source 1..80: mol_type = other DNA

SEQ ID NO: 210535 - DNA, 80 bp, synthetic construct; identical to SEQ ID NO: 25805
  source 1..80: mol_type = other DNA

SEQ ID NO: 210536 - DNA, 80 bp, synthetic construct; identical to SEQ ID NO: 25806
  source 1..80: mol_type = other DNA

SEQ ID NO: 210537 - DNA, 80 bp, synthetic construct; identical to SEQ ID NO: 25807
  source 1..80: mol_type = other DNA

SEQ ID NO: 210538 - DNA, 80 bp, synthetic construct; identical to SEQ ID NO: 25808
  source 1..80: mol_type = other DNA

SEQ ID NO: 210539 - DNA, 80 bp, synthetic construct; identical to SEQ ID NO: 25809
  source 1..80: mol_type = other DNA

SEQ ID NO: 210540 - DNA, 80 bp, synthetic construct; identical to SEQ ID NO: 25810
  source 1..80: mol_type = other DNA

SEQ ID NO: 210541 - DNA, 80 bp, synthetic construct; identical to SEQ ID NO: 25811
  source 1..80: mol_type = other DNA

SEQ ID NO: 210542 - DNA, 80 bp, synthetic construct; identical to SEQ ID NO: 25812
  source 1..80: mol_type = other DNA

SEQ ID NO: 210543 - DNA, 80 bp, synthetic construct; identical to SEQ ID NO: 25813
  source 1..80: mol_type = other DNA

SEQ ID NO: 210544 - DNA, 80 bp, synthetic construct; identical to SEQ ID NO: 25814
  source 1..80: mol_type = other DNA

SEQ ID NO: 210545 - DNA, 80 bp, synthetic construct; identical to SEQ ID NO: 25815
  source 1..80: mol_type = other DNA

SEQ ID NO: 210546 - DNA, 80 bp, synthetic construct; identical to SEQ ID NO: 25816
  source 1..80: mol_type = other DNA

SEQ ID NO: 210547 - DNA, 80 bp, synthetic construct; identical to SEQ ID NO: 25817
  source 1..80: mol_type = other DNA

SEQ ID NO: 210548 - DNA, 80 bp, synthetic construct; identical to SEQ ID NO: 25818
  source 1..80: mol_type = other DNA

SEQ ID NO: 210549 - DNA, 80 bp, synthetic construct; identical to SEQ ID NO: 25819
  source 1..80: mol_type = other DNA

SEQ ID NO: 210550 - DNA, 80 bp, synthetic construct; identical to SEQ ID NO: 25820
  source 1..80: mol_type = other DNA

SEQ ID NO: 210551 - DNA, 80 bp, synthetic construct; identical to SEQ ID NO: 25821
  source 1..80: mol_type = other DNA

SEQ ID NO: 210552 - DNA, 80 bp, synthetic construct; identical to SEQ ID NO: 25822
  source 1..80: mol_type = other DNA

SEQ ID NO: 210553 - DNA, 80 bp, synthetic construct; identical to SEQ ID NO: 25823
  source 1..80: mol_type = other DNA

SEQ ID NO: 210554 - DNA, 80 bp, synthetic construct; identical to SEQ ID NO: 25824
  source 1..80: mol_type = other DNA

SEQ ID NO: 210555 - DNA, 80 bp, synthetic construct; identical to SEQ ID NO: 25825
  source 1..80: mol_type = other DNA

SEQ ID NO: 210556 - DNA, 80 bp, synthetic construct; identical to SEQ ID NO: 25826
  source 1..80: mol_type = other DNA

SEQ ID NO: 210557 - DNA, 80 bp, synthetic construct; identical to SEQ ID NO: 25827
  source 1..80: mol_type = other DNA

SEQ ID NO: 210558 - DNA, 80 bp, synthetic construct; identical to SEQ ID NO: 25828
  source 1..80: mol_type = other DNA

SEQ ID NO: 210559 - DNA, 80 bp, synthetic construct; identical to SEQ ID NO: 25829
  source 1..80: mol_type = other DNA

SEQ ID NO: 210560 - DNA, 80 bp, synthetic construct; identical to SEQ ID NO: 25830
  source 1..80: mol_type = other DNA

SEQ ID NO: 210561 - DNA, 80 bp, synthetic construct; identical to SEQ ID NO: 25831
  source 1..80: mol_type = other DNA

SEQ ID NO: 210562 - DNA, 80 bp, synthetic construct; identical to SEQ ID NO: 25832
  source 1..80: mol_type = other DNA

SEQ ID NO: 210563 - DNA, 80 bp, synthetic construct; identical to SEQ ID NO: 25833
  source 1..80: mol_type = other DNA

SEQ ID NO: 210564 - DNA, 80 bp, synthetic construct; identical to SEQ ID NO: 25834
  source 1..80: mol_type = other DNA

SEQ ID NO: 210565 - DNA, 80 bp, synthetic construct; identical to SEQ ID NO: 25835
  source 1..80: mol_type = other DNA

SEQ ID NO: 210566 - DNA, 80 bp, synthetic construct; identical to SEQ ID NO: 25836
  source 1..80: mol_type = other DNA

SEQ ID NO: 210567 - DNA, 80 bp, synthetic construct; identical to SEQ ID NO: 25837
  source 1..80: mol_type = other DNA

SEQ ID NO: 210568 - DNA, 80 bp, synthetic construct; identical to SEQ ID NO: 25838
  source 1..80: mol_type = other DNA

SEQ ID NO: 210569 - DNA, 80 bp, synthetic construct; identical to SEQ ID NO: 25839
  source 1..80: mol_type = other DNA

SEQ ID NO: 210570 - DNA, 80 bp, synthetic construct; identical to SEQ ID NO: 25840
  source 1..80: mol_type = other DNA

SEQ ID NO: 210571 - DNA, 80 bp, synthetic construct; identical to SEQ ID NO: 25841
  source 1..80: mol_type = other DNA

SEQ ID NO: 210572 - DNA, 80 bp, synthetic construct; identical to SEQ ID NO: 25842
  source 1..80: mol_type = other DNA

SEQ ID NO: 210573 - DNA, 80 bp, synthetic construct; identical to SEQ ID NO: 25843
  source 1..80: mol_type = other DNA

SEQ ID NO: 210574 - DNA, 80 bp, synthetic construct; identical to SEQ ID NO: 25844
  source 1..80: mol_type = other DNA

SEQ ID NO: 210575 - DNA, 80 bp, synthetic construct; identical to SEQ ID NO: 25845
  source 1..80: mol_type = other DNA

SEQ ID NO: 210576 - DNA, 80 bp, synthetic construct; identical to SEQ ID NO: 25846
  source 1..80: mol_type = other DNA

SEQ ID NO: 210577 - DNA, 80 bp, synthetic construct; identical to SEQ ID NO: 25847
  source 1..80: mol_type = other DNA

SEQ ID NO: 210578 - DNA, 80 bp, synthetic construct; identical to SEQ ID NO: 25848
  source 1..80: mol_type = other DNA

SEQ ID NO: 210579 - DNA, 80 bp, synthetic construct; identical to SEQ ID NO: 25849
  source 1..80: mol_type = other DNA

SEQ ID NO: 210580 - DNA, 80 bp, synthetic construct; identical to SEQ ID NO: 25850
  source 1..80: mol_type = other DNA

SEQ ID NO: 210581 - DNA, 80 bp, synthetic construct; identical to SEQ ID NO: 25851
  source 1..80: mol_type = other DNA

SEQ ID NO: 210582 - DNA, 80 bp, synthetic construct; identical to SEQ ID NO: 25852
  source 1..80: mol_type = other DNA

SEQ ID NO: 210583 - DNA, 80 bp, synthetic construct; identical to SEQ ID NO: 25853
  source 1..80: mol_type = other DNA

SEQ ID NO: 210584 - DNA, 80 bp, synthetic construct; identical to SEQ ID NO: 25854
  source 1..80: mol_type = other DNA

SEQ ID NO: 210585 - DNA, 80 bp, synthetic construct; identical to SEQ ID NO: 25855
  source 1..80: mol_type = other DNA

SEQ ID NO: 210586 - DNA, 80 bp, synthetic construct; identical to SEQ ID NO: 25856
  source 1..80: mol_type = other DNA

SEQ ID NO: 210587 - DNA, 80 bp, synthetic construct; identical to SEQ ID NO: 25857
  source 1..80: mol_type = other DNA

SEQ ID NO: 210588 - DNA, 80 bp, synthetic construct; identical to SEQ ID NO: 25858
  source 1..80: mol_type = other DNA

SEQ ID NO: 210589 - DNA, 80 bp, synthetic construct; identical to SEQ ID NO: 25859
  source 1..80: mol_type = other DNA

SEQ ID NO: 210590 - DNA, 80 bp, synthetic construct; identical to SEQ ID NO: 25860
  source 1..80: mol_type = other DNA

SEQ ID NO: 210591 - DNA, 80 bp, synthetic construct; identical to SEQ ID NO: 25861
  source 1..80: mol_type = other DNA

SEQ ID NO: 210592 - DNA, 80 bp, synthetic construct; identical to SEQ ID NO: 25862
  source 1..80: mol_type = other DNA

SEQ ID NO: 210593 - DNA, 80 bp, synthetic construct; identical to SEQ ID NO: 25863
  source 1..80: mol_type = other DNA

SEQ ID NO: 210594 - DNA, 80 bp, synthetic construct; identical to SEQ ID NO: 25864
  source 1..80: mol_type = other DNA

SEQ ID NO: 210595 - DNA, 80 bp, synthetic construct; identical to SEQ ID NO: 25865
  source 1..80: mol_type = other DNA

SEQ ID NO: 210596 - DNA, 80 bp, synthetic construct; identical to SEQ ID NO: 25866
  source 1..80: mol_type = other DNA

SEQ ID NO: 210597 - DNA, 80 bp, synthetic construct; identical to SEQ ID NO: 25867
  source 1..80: mol_type = other DNA

SEQ ID NO: 210598 - DNA, 80 bp, synthetic construct; identical to SEQ ID NO: 25868
  source 1..80: mol_type = other DNA

SEQ ID NO: 210599 - DNA, 80 bp, synthetic construct; identical to SEQ ID NO: 25869
  source 1..80: mol_type = other DNA

SEQ ID NO: 210600 - DNA, 80 bp, synthetic construct; identical to SEQ ID NO: 25870
  source 1..80: mol_type = other DNA

SEQ ID NO: 210601 - DNA, 80 bp, synthetic construct; identical to SEQ ID NO: 25871
  source 1..80: mol_type = other DNA

SEQ ID NO: 210602 - DNA, 80 bp, synthetic construct; identical to SEQ ID NO: 25872
  source 1..80: mol_type = other DNA

SEQ ID NO: 210603 - DNA, 80 bp, synthetic construct; identical to SEQ ID NO: 25873
  source 1..80: mol_type = other DNA

SEQ ID NO: 210604 - DNA, 80 bp, synthetic construct; identical to SEQ ID NO: 25874
  source 1..80: mol_type = other DNA

SEQ ID NO: 210605 - DNA, 80 bp, synthetic construct; identical to SEQ ID NO: 25875
  source 1..80: mol_type = other DNA

SEQ ID NO: 210606 - DNA, 80 bp, synthetic construct; identical to SEQ ID NO: 25876
  source 1..80: mol_type = other DNA

SEQ ID NO: 210607 - DNA, 80 bp, synthetic construct; identical to SEQ ID NO: 25877
  source 1..80: mol_type = other DNA

SEQ ID NO: 210608 - DNA, 80 bp, synthetic construct; identical to SEQ ID NO: 25878
  source 1..80: mol_type = other DNA

SEQ ID NO: 210609 - DNA, 80 bp, synthetic construct; identical to SEQ ID NO: 25879
  source 1..80: mol_type = other DNA

SEQ ID NO: 210610 - DNA, 80 bp, synthetic construct; identical to SEQ ID NO: 25880
  source 1..80: mol_type = other DNA

SEQ ID NO: 210611 - DNA, 80 bp, synthetic construct; identical to SEQ ID NO: 25881
  source 1..80: mol_type = other DNA

SEQ ID NO: 210612 - DNA, 80 bp, synthetic construct; identical to SEQ ID NO: 25882
  source 1..80: mol_type = other DNA

SEQ ID NO: 210613 - DNA, 80 bp, synthetic construct; identical to SEQ ID NO: 25883
  source 1..80: mol_type = other DNA

SEQ ID NO: 210614 - DNA, 80 bp, synthetic construct; identical to SEQ ID NO: 25884
  source 1..80: mol_type = other DNA

SEQ ID NO: 210615 - DNA, 80 bp, synthetic construct; identical to SEQ ID NO: 25885
  source 1..80: mol_type = other DNA

SEQ ID NO: 210616 - DNA, 80 bp, synthetic construct; identical to SEQ ID NO: 25886
  source 1..80: mol_type = other DNA

SEQ ID NO: 210617 - DNA, 80 bp, synthetic construct; identical to SEQ ID NO: 25887
  source 1..80: mol_type = other DNA

SEQ ID NO: 210618 - DNA, 80 bp, synthetic construct; identical to SEQ ID NO: 25888
  source 1..80: mol_type = other DNA

SEQ ID NO: 210619 - DNA, 80 bp, synthetic construct; identical to SEQ ID NO: 25889
  source 1..80: mol_type = other DNA

SEQ ID NO: 210620 - DNA, 80 bp, synthetic construct; identical to SEQ ID NO: 25890
  source 1..80: mol_type = other DNA

SEQ ID NO: 210621 - DNA, 80 bp, synthetic construct; identical to SEQ ID NO: 25891
  source 1..80: mol_type = other DNA

SEQ ID NO: 210622 - DNA, 80 bp, synthetic construct; identical to SEQ ID NO: 25892
  source 1..80: mol_type = other DNA

SEQ ID NO: 210623 - DNA, 80 bp, synthetic construct; identical to SEQ ID NO: 25893
  source 1..80: mol_type = other DNA

SEQ ID NO: 210624 - DNA, 80 bp, synthetic construct; identical to SEQ ID NO: 25894
  source 1..80: mol_type = other DNA

SEQ ID NO: 210625 - DNA, 80 bp, synthetic construct; identical to SEQ ID NO: 25895
  source 1..80: mol_type = other DNA

SEQ ID NO: 210626 - DNA, 80 bp, synthetic construct; identical to SEQ ID NO: 25896
  source 1..80: mol_type = other DNA

SEQ ID NO: 210627 - DNA, 80 bp, synthetic construct; identical to SEQ ID NO: 25897
  source 1..80: mol_type = other DNA

SEQ ID NO: 210628 - DNA, 80 bp, synthetic construct; identical to SEQ ID NO: 25898
  source 1..80: mol_type = other DNA

SEQ ID NO: 210629 - DNA, 80 bp, synthetic construct; identical to SEQ ID NO: 25899
  source 1..80: mol_type = other DNA

SEQ ID NO: 210630 - DNA, 80 bp, synthetic construct; identical to SEQ ID NO: 25900
  source 1..80: mol_type = other DNA

SEQ ID NO: 210631 - DNA, 80 bp, synthetic construct; identical to SEQ ID NO: 25901
  source 1..80: mol_type = other DNA

SEQ ID NO: 210632 - DNA, 80 bp, synthetic construct; identical to SEQ ID NO: 25902
  source 1..80: mol_type = other DNA

SEQ ID NO: 210633 - DNA, 80 bp, synthetic construct; identical to SEQ ID NO: 25903
  source 1..80: mol_type = other DNA

SEQ ID NO: 210634 - DNA, 80 bp, synthetic construct; identical to SEQ ID NO: 25904
  source 1..80: mol_type = other DNA

SEQ ID NO: 210635 - DNA, 80 bp, synthetic construct; identical to SEQ ID NO: 25905
  source 1..80: mol_type = other DNA

SEQ ID NO: 210636 - DNA, 80 bp, synthetic construct; identical to SEQ ID NO: 25906
  source 1..80: mol_type = other DNA

SEQ ID NO: 210637 - DNA, 80 bp, synthetic construct; identical to SEQ ID NO: 25907
  source 1..80: mol_type = other DNA

SEQ ID NO: 210638 - DNA, 80 bp, synthetic construct; identical to SEQ ID NO: 25908
  source 1..80: mol_type = other DNA

SEQ ID NO: 210639 - DNA, 80 bp, synthetic construct; identical to SEQ ID NO: 25909
  source 1..80: mol_type = other DNA

SEQ ID NO: 210640 - DNA, 80 bp, synthetic construct; identical to SEQ ID NO: 25910
  source 1..80: mol_type = other DNA

SEQ ID NO: 210641 - DNA, 80 bp, synthetic construct; identical to SEQ ID NO: 25911
  source 1..80: mol_type = other DNA

SEQ ID NO: 210642 - DNA, 80 bp, synthetic construct; identical to SEQ ID NO: 25912
  source 1..80: mol_type = other DNA

SEQ ID NO: 210643 - DNA, 80 bp, synthetic construct; identical to SEQ ID NO: 25913
  source 1..80: mol_type = other DNA

SEQ ID NO: 210644 - DNA, 80 bp, synthetic construct; identical to SEQ ID NO: 25914
  source 1..80: mol_type = other DNA

SEQ ID NO: 210645 - DNA, 80 bp, synthetic construct; identical to SEQ ID NO: 25915
  source 1..80: mol_type = other DNA

SEQ ID NO: 210646 - DNA, 80 bp, synthetic construct; identical to SEQ ID NO: 25916
  source 1..80: mol_type = other DNA

SEQ ID NO: 210647 - DNA, 80 bp, synthetic construct; identical to SEQ ID NO: 25917
  source 1..80: mol_type = other DNA

SEQ ID NO: 210648 - DNA, 80 bp, synthetic construct; identical to SEQ ID NO: 25918
  source 1..80: mol_type = other DNA

SEQ ID NO: 210649 - DNA, 80 bp, synthetic construct; identical to SEQ ID NO: 25919
  source 1..80: mol_type = other DNA

SEQ ID NO: 210650 - DNA, 80 bp, synthetic construct; identical to SEQ ID NO: 25920
  source 1..80: mol_type = other DNA

SEQ ID NO: 210651 - DNA, 80 bp, synthetic construct; identical to SEQ ID NO: 25921
  source 1..80: mol_type = other DNA

SEQ ID NO: 210652 - DNA, 80 bp, synthetic construct; identical to SEQ ID NO: 25922
  source 1..80: mol_type = other DNA

SEQ ID NO: 210653 - DNA, 80 bp, synthetic construct; identical to SEQ ID NO: 25923
  source 1..80: mol_type = other DNA

SEQ ID NO: 210654 - DNA, 80 bp, synthetic construct; identical to SEQ ID NO: 25924
  source 1..80: mol_type = other DNA

SEQ ID NO: 210655 - DNA, 80 bp, synthetic construct; identical to SEQ ID NO: 25925
  source 1..80: mol_type = other DNA

SEQ ID NO: 210656 - DNA, 80 bp, synthetic construct; identical to SEQ ID NO: 25926
  source 1..80: mol_type = other DNA

SEQ ID NO: 210657 - DNA, 80 bp, synthetic construct; identical to SEQ ID NO: 25927
  source 1..80: mol_type = other DNA

SEQ ID NO: 210658 - DNA, 80 bp, synthetic construct; identical to SEQ ID NO: 25928
  source 1..80: mol_type = other DNA

SEQ ID NO: 210659 - DNA, 80 bp, synthetic construct; identical to SEQ ID NO: 25929
  source 1..80: mol_type = other DNA

SEQ ID NO: 210660 - DNA, 80 bp, synthetic construct; identical to SEQ ID NO: 25930
  source 1..80: mol_type = other DNA

SEQ ID NO: 210661 - DNA, 80 bp, synthetic construct; identical to SEQ ID NO: 25931
  source 1..80: mol_type = other DNA

SEQ ID NO: 210662 - DNA, 80 bp, synthetic construct; identical to SEQ ID NO: 25932
  source 1..80: mol_type = other DNA

SEQ ID NO: 210663 - DNA, 80 bp, synthetic construct; identical to SEQ ID NO: 25933
  source 1..80: mol_type = other DNA

SEQ ID NO: 210664 - DNA, 80 bp, synthetic construct; identical to SEQ ID NO: 25934
  source 1..80: mol_type = other DNA

SEQ ID NO: 210665 - DNA, 80 bp, synthetic construct; identical to SEQ ID NO: 25935
  source 1..80: mol_type = other DNA

SEQ ID NO: 210666 - DNA, 80 bp, synthetic construct; identical to SEQ ID NO: 25936
  source 1..80: mol_type = other DNA

SEQ ID NO: 210667 - DNA, 80 bp, synthetic construct; identical to SEQ ID NO: 25937
  source 1..80: mol_type = other DNA

SEQ ID NO: 210668 - DNA, 80 bp, synthetic construct; identical to SEQ ID NO: 25938
  source 1..80: mol_type = other DNA

SEQ ID NO: 210669 - DNA, 80 bp, synthetic construct; identical to SEQ ID NO: 25939
  source 1..80: mol_type = other DNA

SEQ ID NO: 210670 - DNA, 80 bp, synthetic construct; identical to SEQ ID NO: 25940
  source 1..80: mol_type = other DNA

SEQ ID NO: 210671 - DNA, 80 bp, synthetic construct; identical to SEQ ID NO: 25941
  source 1..80: mol_type = other DNA

SEQ ID NO: 210672 - DNA, 80 bp, synthetic construct; identical to SEQ ID NO: 25942
  source 1..80: mol_type = other DNA

SEQ ID NO: 210673 - DNA, 80 bp, synthetic construct; identical to SEQ ID NO: 25943
  source 1..80: mol_type = other DNA

SEQ ID NO: 210674 - DNA, 80 bp, synthetic construct; identical to SEQ ID NO: 25944
  source 1..80: mol_type = other DNA

SEQ ID NO: 210675 - DNA, 80 bp, synthetic construct; identical to SEQ ID NO: 25945
  source 1..80: mol_type = other DNA

SEQ ID NO: 210676 - DNA, 80 bp, synthetic construct; identical to SEQ ID NO: 25946
  source 1..80: mol_type = other DNA

SEQ ID NO: 210677 - DNA, 80 bp, synthetic construct; identical to SEQ ID NO: 25947
  source 1..80: mol_type = other DNA

SEQ ID NO: 210678 - DNA, 80 bp, synthetic construct; identical to SEQ ID NO: 25948
  source 1..80: mol_type = other DNA

SEQ ID NO: 210679 - DNA, 80 bp, synthetic construct; identical to SEQ ID NO: 25949
  source 1..80: mol_type = other DNA

SEQ ID NO: 210680 - DNA, 80 bp, synthetic construct; identical to SEQ ID NO: 25950
  source 1..80: mol_type = other DNA

SEQ ID NO: 210681 - DNA, 80 bp, synthetic construct; identical to SEQ ID NO: 25951
  source 1..80: mol_type = other DNA

SEQ ID NO: 210682 - DNA, 80 bp, synthetic construct; identical to SEQ ID NO: 25952
  source 1..80: mol_type = other DNA

SEQ ID NO: 210683 - DNA, 80 bp, synthetic construct; identical to SEQ ID NO: 25953
  source 1..80: mol_type = other DNA

SEQ ID NO: 210684 - DNA, 80 bp, synthetic construct; identical to SEQ ID NO: 25954
  source 1..80: mol_type = other DNA

SEQ ID NO: 210685 - DNA, 80 bp, synthetic construct; identical to SEQ ID NO: 25955
  source 1..80: mol_type = other DNA

SEQ ID NO: 210686 - DNA, 80 bp, synthetic construct; identical to SEQ ID NO: 25956
  source 1..80: mol_type = other DNA

SEQ ID NO: 210687 - DNA, 80 bp, synthetic construct; identical to SEQ ID NO: 25957
  source 1..80: mol_type = other DNA

SEQ ID NO: 210688 - DNA, 80 bp, synthetic construct; identical to SEQ ID NO: 25958
  source 1..80: mol_type = other DNA

SEQ ID NO: 210689 - DNA, 80 bp, synthetic construct; identical to SEQ ID NO: 25959
  source 1..80: mol_type = other DNA

SEQ ID NO: 210690 - DNA, 80 bp, synthetic construct; identical to SEQ ID NO: 25960
  source 1..80: mol_type = other DNA

SEQ ID NO: 210691 - DNA, 80 bp, synthetic construct; identical to SEQ ID NO: 25961
  source 1..80: mol_type = other DNA

SEQ ID NO: 210692 - DNA, 80 bp, synthetic construct; identical to SEQ ID NO: 25962
  source 1..80: mol_type = other DNA

SEQ ID NO: 210693 - DNA, 80 bp, synthetic construct; identical to SEQ ID NO: 25963
  source 1..80: mol_type = other DNA

SEQ ID NO: 210694 - DNA, 80 bp, synthetic construct; identical to SEQ ID NO: 25964
  source 1..80: mol_type = other DNA

SEQ ID NO: 210695 - DNA, 80 bp, synthetic construct; identical to SEQ ID NO: 25965
  source 1..80: mol_type = other DNA

SEQ ID NO: 210696 - DNA, 80 bp, synthetic construct; identical to SEQ ID NO: 25966
  source 1..80: mol_type = other DNA

SEQ ID NO: 210697 - DNA, 80 bp, synthetic construct; identical to SEQ ID NO: 25967
  source 1..80: mol_type = other DNA

SEQ ID NO: 210698 - DNA, 80 bp, synthetic construct; identical to SEQ ID NO: 25968
  source 1..80: mol_type = other DNA

SEQ ID NO: 210699 - DNA, 80 bp, synthetic construct; identical to SEQ ID NO: 25969
  source 1..80: mol_type = other DNA

SEQ ID NO: 210700 - DNA, 80 bp, synthetic construct; identical to SEQ ID NO: 25970
  source 1..80: mol_type = other DNA

SEQ ID NO: 210701 - DNA, 80 bp, synthetic construct; identical to SEQ ID NO: 25971
  source 1..80: mol_type = other DNA

SEQ ID NO: 210702 - DNA, 80 bp, synthetic construct; identical to SEQ ID NO: 25972
  source 1..80: mol_type = other DNA

SEQ ID NO: 210703 - DNA, 80 bp, synthetic construct; identical to SEQ ID NO: 25973
  source 1..80: mol_type = other DNA

SEQ ID NO: 210704 - DNA, 80 bp, synthetic construct; identical to SEQ ID NO: 25974
  source 1..80: mol_type = other DNA

SEQ ID NO: 210705 - DNA, 80 bp, synthetic construct; identical to SEQ ID NO: 25975
  source 1..80: mol_type = other DNA

SEQ ID NO: 210706 - DNA, 80 bp, synthetic construct; identical to SEQ ID NO: 25976
  source 1..80: mol_type = other DNA

SEQ ID NO: 210707 - DNA, 80 bp, synthetic construct; identical to SEQ ID NO: 25977
  source 1..80: mol_type = other DNA

SEQ ID NO: 210708 - DNA, 80 bp, synthetic construct; identical to SEQ ID NO: 25978
  source 1..80: mol_type = other DNA

SEQ ID NO: 210709 - DNA, 80 bp, synthetic construct; identical to SEQ ID NO: 25979
  source 1..80: mol_type = other DNA

SEQ ID NO: 210710 - DNA, 80 bp, synthetic construct; identical to SEQ ID NO: 25980
  source 1..80: mol_type = other DNA

SEQ ID NO: 210711 - DNA, 80 bp, synthetic construct; identical to SEQ ID NO: 25981
  source 1..80: mol_type = other DNA

SEQ ID NO: 210712 - DNA, 80 bp, synthetic construct; identical to SEQ ID NO: 25982
  source 1..80: mol_type = other DNA

SEQ ID NO: 210713 - DNA, 80 bp, synthetic construct; identical to SEQ ID NO: 25983
  source 1..80: mol_type = other DNA

SEQ ID NO: 210714 - DNA, 80 bp, synthetic construct; identical to SEQ ID NO: 25984
  source 1..80: mol_type = other DNA

SEQ ID NO: 210715 - DNA, 80 bp, synthetic construct; identical to SEQ ID NO: 25985
  source 1..80: mol_type = other DNA

SEQ ID NO: 210716 - DNA, 80 bp, synthetic construct; identical to SEQ ID NO: 25986
  source 1..80: mol_type = other DNA

SEQ ID NO: 210717 - DNA, 80 bp, synthetic construct; identical to SEQ ID NO: 25987
  source 1..80: mol_type = other DNA

SEQ ID NO: 210718 - DNA, 80 bp, synthetic construct; identical to SEQ ID NO: 25988
  source 1..80: mol_type = other DNA

SEQ ID NO: 210719 - DNA, 80 bp, synthetic construct; identical to SEQ ID NO: 25989
  source 1..80: mol_type = other DNA

SEQ ID NO: 210720 - DNA, 80 bp, synthetic construct; identical to SEQ ID NO: 25990
  source 1..80: mol_type = other DNA

SEQ ID NO: 210721 - DNA, 80 bp, synthetic construct; identical to SEQ ID NO: 25991
  source 1..80: mol_type = other DNA

SEQ ID NO: 210722 - DNA, 80 bp, synthetic construct; identical to SEQ ID NO: 25992
  source 1..80: mol_type = other DNA

SEQ ID NO: 210723 - DNA, 80 bp, synthetic construct; identical to SEQ ID NO: 25993
  source 1..80: mol_type = other DNA

SEQ ID NO: 210724 - DNA, 80 bp, synthetic construct; identical to SEQ ID NO: 25994
  source 1..80: mol_type = other DNA

SEQ ID NO: 210725 - DNA, 80 bp, synthetic construct; identical to SEQ ID NO: 25995
  source 1..80: mol_type = other DNA

SEQ ID NO: 210726 - DNA, 80 bp, synthetic construct; identical to SEQ ID NO: 25996
  source 1..80: mol_type = other DNA

SEQ ID NO: 210727 - DNA, 80 bp, synthetic construct; identical to SEQ ID NO: 25997
  source 1..80: mol_type = other DNA

SEQ ID NO: 210728 - DNA, 80 bp, synthetic construct; identical to SEQ ID NO: 25998
  source 1..80: mol_type = other DNA

SEQ ID NO: 210729 - DNA, 80 bp, synthetic construct; identical to SEQ ID NO: 25999
  source 1..80: mol_type = other DNA

SEQ ID NO: 210730 - DNA, 80 bp, synthetic construct; identical to SEQ ID NO: 26000
  source 1..80: mol_type = other DNA

SEQ ID NO: 210731 - DNA, 80 bp, synthetic construct; identical to SEQ ID NO: 26001
  source 1..80: mol_type = other DNA

SEQ ID NO: 210732 - DNA, 80 bp, synthetic construct; identical to SEQ ID NO: 26002
  source 1..80: mol_type = other DNA

SEQ ID NO: 210733 - DNA, 80 bp, synthetic construct; identical to SEQ ID NO: 26003
  source 1..80: mol_type = other DNA

SEQ ID NO: 210734 - DNA, 80 bp, synthetic construct; identical to SEQ ID NO: 26004
  source 1..80: mol_type = other DNA

SEQ ID NO: 210735 - DNA, 80 bp, synthetic construct; identical to SEQ ID NO: 26005
  source 1..80: mol_type = other DNA

SEQ ID NO: 210736 - DNA, 80 bp, synthetic construct; identical to SEQ ID NO: 26006
  source 1..80: mol_type = other DNA

SEQ ID NO: 210737 - DNA, 80 bp, synthetic construct; identical to SEQ ID NO: 26007
  source 1..80: mol_type = other DNA

SEQ ID NO: 210738 - DNA, 80 bp, synthetic construct; identical to SEQ ID NO: 26008
  source 1..80: mol_type = other DNA

SEQ ID NO: 210739 - DNA, 80 bp, synthetic construct; identical to SEQ ID NO: 26009
  source 1..80: mol_type = other DNA

SEQ ID NO: 210740 - DNA, 80 bp, synthetic construct; identical to SEQ ID NO: 26010
  source 1..80: mol_type = other DNA

SEQ ID NO: 210741 - DNA, 80 bp, synthetic construct; identical to SEQ ID NO: 26011
  source 1..80: mol_type = other DNA

SEQ ID NO: 210742 - DNA, 80 bp, synthetic construct; identical to SEQ ID NO: 26012
  source 1..80: mol_type = other DNA

SEQ ID NO: 210743 - DNA, 80 bp, synthetic construct; identical to SEQ ID NO: 26013
  source 1..80: mol_type = other DNA

SEQ ID NO: 210744 - DNA, 80 bp, synthetic construct; identical to SEQ ID NO: 26014
  source 1..80: mol_type = other DNA

SEQ ID NO: 210745 - DNA, 80 bp, synthetic construct; identical to SEQ ID NO: 26015
  source 1..80: mol_type = other DNA

SEQ ID NO: 210746 - DNA, 80 bp, synthetic construct; identical to SEQ ID NO: 26016
  source 1..80: mol_type = other DNA

SEQ ID NO: 210747 - DNA, 80 bp, synthetic construct; identical to SEQ ID NO: 26017
  source 1..80: mol_type = other DNA

SEQ ID NO: 210748 - DNA, 80 bp, synthetic construct; identical to SEQ ID NO: 26018
  source 1..80: mol_type = other DNA

SEQ ID NO: 210749 - DNA, 80 bp, synthetic construct; identical to SEQ ID NO: 26019
  source 1..80: mol_type = other DNA

SEQ ID NO: 210750 - DNA, 80 bp, synthetic construct; identical to SEQ ID NO: 26020
  source 1..80: mol_type = other DNA

SEQ ID NO: 210751 - DNA, 80 bp, synthetic construct; identical to SEQ ID NO: 26021
  source 1..80: mol_type = other DNA

SEQ ID NO: 210752 - DNA, 80 bp, synthetic construct; identical to SEQ ID NO: 26022
  source 1..80: mol_type = other DNA

SEQ ID NO: 210753 - DNA, 80 bp, synthetic construct; identical to SEQ ID NO: 26023
  source 1..80: mol_type = other DNA

SEQ ID NO: 210754 - DNA, 80 bp, synthetic construct; identical to SEQ ID NO: 26024
  source 1..80: mol_type = other DNA

SEQ ID NO: 210755 - DNA, 80 bp, synthetic construct; identical to SEQ ID NO: 26025
  source 1..80: mol_type = other DNA

SEQ ID NO: 210756 - DNA, 80 bp, synthetic construct; identical to SEQ ID NO: 26026
  source 1..80: mol_type = other DNA

SEQ ID NO: 210757 - DNA, 80 bp, synthetic construct; identical to SEQ ID NO: 26027
  source 1..80: mol_type = other DNA

SEQ ID NO: 210758 - DNA, 80 bp, synthetic construct; identical to SEQ ID NO: 26028
  source 1..80: mol_type = other DNA

SEQ ID NO: 210759 - DNA, 80 bp, synthetic construct; identical to SEQ ID NO: 26029
  source 1..80: mol_type = other DNA

SEQ ID NO: 210760 - DNA, 80 bp, synthetic construct; identical to SEQ ID NO: 26030
  source 1..80: mol_type = other DNA

SEQ ID NO: 210761 - DNA, 80 bp, synthetic construct; identical to SEQ ID NO: 26031
  source 1..80: mol_type = other DNA

SEQ ID NO: 210762 - DNA, 80 bp, synthetic construct; identical to SEQ ID NO: 26032
  source 1..80: mol_type = other DNA

SEQ ID NO: 210763 - DNA, 80 bp, synthetic construct; identical to SEQ ID NO: 26033
  source 1..80: mol_type = other DNA

SEQ ID NO: 210764 - DNA, 80 bp, synthetic construct; identical to SEQ ID NO: 26034
  source 1..80: mol_type = other DNA

SEQ ID NO: 210765 - DNA, 80 bp, synthetic construct; identical to SEQ ID NO: 26035
  source 1..80: mol_type = other DNA

SEQ ID NO: 210766 - DNA, 80 bp, synthetic construct; identical to SEQ ID NO: 26036
  source 1..80: mol_type = other DNA

SEQ ID NO: 210767 - DNA, 80 bp, synthetic construct; identical to SEQ ID NO: 26037
  source 1..80: mol_type = other DNA

SEQ ID NO: 210768 - DNA, 80 bp, synthetic construct; identical to SEQ ID NO: 26038
  source 1..80: mol_type = other DNA

SEQ ID NO: 210769 - DNA, 80 bp, synthetic construct; identical to SEQ ID NO: 26039
  source 1..80: mol_type = other DNA

SEQ ID NO: 210770 - DNA, 80 bp, synthetic construct; identical to SEQ ID NO: 26040
  source 1..80: mol_type = other DNA

SEQ ID NO: 210771 - DNA, 80 bp, synthetic construct; identical to SEQ ID NO: 26041
  source 1..80: mol_type = other DNA

SEQ ID NO: 210772 - DNA, 80 bp, synthetic construct; identical to SEQ ID NO: 26042
  source 1..80: mol_type = other DNA

SEQ ID NO: 210773 - DNA, 80 bp, synthetic construct; identical to SEQ ID NO: 26043
  source 1..80: mol_type = other DNA

SEQ ID NO: 210774 - DNA, 80 bp, synthetic construct; identical to SEQ ID NO: 26044
  source 1..80: mol_type = other DNA

SEQ ID NO: 210775 - DNA, 80 bp, synthetic construct; identical to SEQ ID NO: 26045
  source 1..80: mol_type = other DNA

SEQ ID NO: 210776 - DNA, 80 bp, synthetic construct; identical to SEQ ID NO: 26046
  source 1..80: mol_type = other DNA

SEQ ID NO: 210777 - DNA, 80 bp, synthetic construct; identical to SEQ ID NO: 26047
  source 1..80: mol_type = other DNA

SEQ ID NO: 210778 - DNA, 80 bp, synthetic construct; identical to SEQ ID NO: 26048
  source 1..80: mol_type = other DNA

SEQ ID NO: 210779 - DNA, 80 bp, synthetic construct; identical to SEQ ID NO: 26049
  source 1..80: mol_type = other DNA

SEQ ID NO: 210780 - DNA, 80 bp, synthetic construct; identical to SEQ ID NO: 26050
  source 1..80: mol_type = other DNA

SEQ ID NO: 210781 - DNA, 80 bp, synthetic construct; identical to SEQ ID NO: 26051
  source 1..80: mol_type = other DNA

SEQ ID NO: 210782 - DNA, 80 bp, synthetic construct; identical to SEQ ID NO: 26052
  source 1..80: mol_type = other DNA

SEQ ID NO: 210783 - DNA, 80 bp, synthetic construct; identical to SEQ ID NO: 26053
  source 1..80: mol_type = other DNA

SEQ ID NO: 210784 - DNA, 80 bp, synthetic construct; identical to SEQ ID NO: 26054
  source 1..80: mol_type = other DNA

SEQ ID NO: 210785 - DNA, 80 bp, synthetic construct; identical to SEQ ID NO: 26055
  source 1..80: mol_type = other DNA

SEQ ID NO: 210786 - DNA, 80 bp, synthetic construct; identical to SEQ ID NO: 26056
  source 1..80: mol_type = other DNA

SEQ ID NO: 210787 - DNA, 80 bp, synthetic construct; identical to SEQ ID NO: 26057
  source 1..80: mol_type = other DNA

SEQ ID NO: 210788 - DNA, 80 bp, synthetic construct; identical to SEQ ID NO: 26058
  source 1..80: mol_type = other DNA

SEQ ID NO: 210789 - DNA, 80 bp, synthetic construct; identical to SEQ ID NO: 26059
  source 1..80: mol_type = other DNA

SEQ ID NO: 210790 - DNA, 80 bp, synthetic construct; identical to SEQ ID NO: 26060
  source 1..80: mol_type = other DNA

SEQ ID NO: 210791 - DNA, 80 bp, synthetic construct; identical to SEQ ID NO: 26061
  source 1..80: mol_type = other DNA

SEQ ID NO: 210792 - DNA, 80 bp, synthetic construct; identical to SEQ ID NO: 26062
  source 1..80: mol_type = other DNA

SEQ ID NO: 210793 - DNA, 80 bp, synthetic construct; identical to SEQ ID NO: 26063
  source 1..80: mol_type = other DNA

SEQ ID NO: 210794 - DNA, 80 bp, synthetic construct; identical to SEQ ID NO: 26064
  source 1..80: mol_type = other DNA

SEQ ID NO: 210795 - DNA, 80 bp, synthetic construct; identical to SEQ ID NO: 26065
  source 1..80: mol_type = other DNA

SEQ ID NO: 210796 - DNA, 80 bp, synthetic construct; identical to SEQ ID NO: 26066
  source 1..80: mol_type = other DNA

SEQ ID NO: 210797 - DNA, 80 bp, synthetic construct; identical to SEQ ID NO: 26067
  source 1..80: mol_type = other DNA

SEQ ID NO: 210798 - DNA, 80 bp, synthetic construct; identical to SEQ ID NO: 26068
  source 1..80: mol_type = other DNA

SEQ ID NO: 210799 - DNA, 80 bp, synthetic construct; identical to SEQ ID NO: 26069
  source 1..80: mol_type = other DNA

SEQ ID NO: 210800 - DNA, 80 bp, synthetic construct; identical to SEQ ID NO: 26070
  source 1..80: mol_type = other DNA

SEQ ID NO: 210801 - DNA, 80 bp, synthetic construct; identical to SEQ ID NO: 26071
  source 1..80: mol_type = other DNA

SEQ ID NO: 210802 - DNA, 80 bp, synthetic construct; identical to SEQ ID NO: 26072
  source 1..80: mol_type = other DNA

SEQ ID NO: 210803 - DNA, 80 bp, synthetic construct; identical to SEQ ID NO: 26073
  source 1..80: mol_type = other DNA

SEQ ID NO: 210804 - DNA, 80 bp, synthetic construct; identical to SEQ ID NO: 26074
  source 1..80: mol_type = other DNA

SEQ ID NO: 210805 - DNA, 80 bp, synthetic construct; identical to SEQ ID NO: 26075
  source 1..80: mol_type = other DNA

SEQ ID NO: 210806 - DNA, 80 bp, synthetic construct; identical to SEQ ID NO: 26076
  source 1..80: mol_type = other DNA

SEQ ID NO: 210807 - DNA, 80 bp, synthetic construct; identical to SEQ ID NO: 26077
  source 1..80: mol_type = other DNA

SEQ ID NO: 210808 - DNA, 80 bp, synthetic construct; identical to SEQ ID NO: 26078
  source 1..80: mol_type = other DNA

SEQ ID NO: 210809 - DNA, 80 bp, synthetic construct; identical to SEQ ID NO: 26079
  source 1..80: mol_type = other DNA

SEQ ID NO: 210810 - DNA, 80 bp, synthetic construct; identical to SEQ ID NO: 26080
  source 1..80: mol_type = other DNA

SEQ ID NO: 210811 - DNA, 80 bp, synthetic construct; identical to SEQ ID NO: 26081
  source 1..80: mol_type = other DNA

SEQ ID NO: 210812 - DNA, 80 bp, synthetic construct; identical to SEQ ID NO: 26082
  source 1..80: mol_type = other DNA

SEQ ID NO: 210813 - DNA, 80 bp, synthetic construct; identical to SEQ ID NO: 26083
  source 1..80: mol_type = other DNA

SEQ ID NO: 210814 - DNA, 80 bp, synthetic construct; identical to SEQ ID NO: 26084
  source 1..80: mol_type = other DNA

SEQ ID NO: 210815 - DNA, 80 bp, synthetic construct; identical to SEQ ID NO: 26085
  source 1..80: mol_type = other DNA

SEQ ID NO: 210816 - DNA, 80 bp, synthetic construct; identical to SEQ ID NO: 26086
  source 1..80: mol_type = other DNA

SEQ ID NO: 210817 - DNA, 80 bp, synthetic construct; identical to SEQ ID NO: 26087
  source 1..80: mol_type = other DNA

SEQ ID NO: 210818 - DNA, 80 bp, synthetic construct; identical to SEQ ID NO: 26088
  source 1..80: mol_type = other DNA

SEQ ID NO: 210819 - DNA, 80 bp, synthetic construct; identical to SEQ ID NO: 26089
  source 1..80: mol_type = other DNA

SEQ ID NO: 210820 - DNA, 80 bp, synthetic construct; identical to SEQ ID NO: 26090
  source 1..80: mol_type = other DNA

SEQ ID NO: 210821 - DNA, 80 bp, synthetic construct; identical to SEQ ID NO: 26091
  source 1..80: mol_type = other DNA

SEQ ID NO: 210822 - DNA, 80 bp, synthetic construct; identical to SEQ ID NO: 26092
  source 1..80: mol_type = other DNA

SEQ ID NO: 210823 - DNA, 80 bp, synthetic construct; identical to SEQ ID NO: 26093
  source 1..80: mol_type = other DNA

SEQ ID NO: 210824 - DNA, 80 bp, synthetic construct; identical to SEQ ID NO: 26094
  source 1..80: mol_type = other DNA

SEQ ID NO: 210825 - DNA, 80 bp, synthetic construct; identical to SEQ ID NO: 26095
  source 1..80: mol_type = other DNA

SEQ ID NO: 210826 - DNA, 80 bp, synthetic construct; identical to SEQ ID NO: 26096
  source 1..80: mol_type = other DNA

SEQ ID NO: 210827 - DNA, 80 bp, synthetic construct; identical to SEQ ID NO: 26097
  source 1..80: mol_type = other DNA

SEQ ID NO: 210828 - DNA, 80 bp, synthetic construct; identical to SEQ ID NO: 26098
  source 1..80: mol_type = other DNA

SEQ ID NO: 210829 - DNA, 80 bp, synthetic construct; identical to SEQ ID NO: 26099
  source 1..80: mol_type = other DNA

SEQ ID NO: 210830 - DNA, 80 bp, synthetic construct; identical to SEQ ID NO: 26100
  source 1..80: mol_type = other DNA

SEQ ID NO: 210831 - DNA, 80 bp, synthetic construct; identical to SEQ ID NO: 26101
  source 1..80: mol_type = other DNA

SEQ ID NO: 210832 - DNA, 80 bp, synthetic construct; identical to SEQ ID NO: 26102
  source 1..80: mol_type = other DNA

SEQ ID NO: 210833 - DNA, 80 bp, synthetic construct; identical to SEQ ID NO: 26103
  source 1..80: mol_type = other DNA

SEQ ID NO: 210834 - DNA, 80 bp, synthetic construct; identical to SEQ ID NO: 26104
  source 1..80: mol_type = other DNA

SEQ ID NO: 210835 - DNA, 80 bp, synthetic construct; identical to SEQ ID NO: 26105
  source 1..80: mol_type = other DNA

SEQ ID NO: 210836 - DNA, 80 bp, synthetic construct; identical to SEQ ID NO: 26106
  source 1..80: mol_type = other DNA

SEQ ID NO: 210837 - DNA, 80 bp, synthetic construct; identical to SEQ ID NO: 26107
  source 1..80: mol_type = other DNA

SEQ ID NO: 210838 - DNA, 80 bp, synthetic construct; identical to SEQ ID NO: 26108
  source 1..80: mol_type = other DNA

SEQ ID NO: 210839 - DNA, 80 bp, synthetic construct; identical to SEQ ID NO: 26109
  source 1..80: mol_type = other DNA

SEQ ID NO: 210840 - DNA, 80 bp, synthetic construct; identical to SEQ ID NO: 26110
  source 1..80: mol_type = other DNA

SEQ ID NO: 210841 - DNA, 80 bp, synthetic construct; identical to SEQ ID NO: 26111
  source 1..80: mol_type = other DNA

SEQ ID NO: 210842 - DNA, 80 bp, synthetic construct; identical to SEQ ID NO: 26112
  source 1..80: mol_type = other DNA

SEQ ID NO: 210843 - DNA, 80 bp, synthetic construct; identical to SEQ ID NO: 26113
  source 1..80: mol_type = other DNA

SEQ ID NO: 210844 - DNA, 80 bp, synthetic construct; identical to SEQ ID NO: 26114
  source 1..80: mol_type = other DNA

SEQ ID NO: 210845 - DNA, 80 bp, synthetic construct; identical to SEQ ID NO: 26115
  source 1..80: mol_type = other DNA

SEQ ID NO: 210846 - DNA, 80 bp, synthetic construct; identical to SEQ ID NO: 26116
  source 1..80: mol_type = other DNA

SEQ ID NO: 210847 - DNA, 80 bp, synthetic construct; identical to SEQ ID NO: 26117
  source 1..80: mol_type = other DNA

SEQ ID NO: 210848 - DNA, 80 bp, synthetic construct; identical to SEQ ID NO: 26118
  source 1..80: mol_type = other DNA

SEQ ID NO: 210849 - DNA, 80 bp, synthetic construct; identical to SEQ ID NO: 26119
  source 1..80: mol_type = other DNA

SEQ ID NO: 210850 - DNA, 80 bp, synthetic construct; identical to SEQ ID NO: 26120
  source 1..80: mol_type = other DNA

SEQ ID NO: 210851 - DNA, 80 bp, synthetic construct; identical to SEQ ID NO: 26121
  source 1..80: mol_type = other DNA

SEQ ID NO: 210852 - DNA, 80 bp, synthetic construct; identical to SEQ ID NO: 26122
  source 1..80: mol_type = other DNA

SEQ ID NO: 210853 - DNA, 80 bp, synthetic construct; identical to SEQ ID NO: 26123
  source 1..80: mol_type = other DNA

SEQ ID NO: 210854 - DNA, 80 bp, synthetic construct; identical to SEQ ID NO: 26124
  source 1..80: mol_type = other DNA

SEQ ID NO: 210855 - DNA, 80 bp, synthetic construct; identical to SEQ ID NO: 26125
  source 1..80: mol_type = other DNA

SEQ ID NO: 210856 - DNA, 80 bp, synthetic construct; identical to SEQ ID NO: 26126
  source 1..80: mol_type = other DNA

SEQ ID NO: 210857 - DNA, 80 bp, synthetic construct; identical to SEQ ID NO: 26127
  source 1..80: mol_type = other DNA

SEQ ID NO: 210858 - DNA, 80 bp, synthetic construct; identical to SEQ ID NO: 26128
  source 1..80: mol_type = other DNA

SEQ ID NO: 210859 - DNA, 80 bp, synthetic construct; identical to SEQ ID NO: 26129
  source 1..80: mol_type = other DNA

SEQ ID NO: 210860 - DNA, 80 bp, synthetic construct; identical to SEQ ID NO: 26130
  source 1..80: mol_type = other DNA

SEQ ID NO: 210861 - DNA, 80 bp, synthetic construct; identical to SEQ ID NO: 26131
  source 1..80: mol_type = other DNA

SEQ ID NO: 210862 - DNA, 80 bp, synthetic construct; identical to SEQ ID NO: 26132
  source 1..80: mol_type = other DNA

SEQ ID NO: 210863 - DNA, 80 bp, synthetic construct; identical to SEQ ID NO: 26133
  source 1..80: mol_type = other DNA

SEQ ID NO: 210864 - DNA, 80 bp, synthetic construct; identical to SEQ ID NO: 26134
  source 1..80: mol_type = other DNA

SEQ ID NO: 210865 - DNA, 80 bp, synthetic construct; identical to SEQ ID NO: 26135
  source 1..80: mol_type = other DNA

SEQ ID NO: 210866 - DNA, 80 bp, synthetic construct; identical to SEQ ID NO: 26136
  source 1..80: mol_type = other DNA

SEQ ID NO: 210867 - DNA, 80 bp, synthetic construct; identical to SEQ ID NO: 26137
  source 1..80: mol_type = other DNA

SEQ ID NO: 210868 - DNA, 80 bp, synthetic construct; identical to SEQ ID NO: 26138
  source 1..80: mol_type = other DNA

SEQ ID NO: 210869 - DNA, 80 bp, synthetic construct; identical to SEQ ID NO: 26139
  source 1..80: mol_type = other DNA

SEQ ID NO: 210870 - DNA, 80 bp, synthetic construct; identical to SEQ ID NO: 26140
  source 1..80: mol_type = other DNA

SEQ ID NO: 210871 - DNA, 80 bp, synthetic construct; identical to SEQ ID NO: 26141
  source 1..80: mol_type = other DNA

SEQ ID NO: 210872 - DNA, 80 bp, synthetic construct; identical to SEQ ID NO: 26142
  source 1..80: mol_type = other DNA

SEQ ID NO: 210873 - DNA, 80 bp, synthetic construct; identical to SEQ ID NO: 26143
  source 1..80: mol_type = other DNA

SEQ ID NO: 210874 - DNA, 80 bp, synthetic construct; identical to SEQ ID NO: 26144
  source 1..80: mol_type = other DNA

SEQ ID NO: 210875 - DNA, 80 bp, synthetic construct; identical to SEQ ID NO: 26145
  source 1..80: mol_type = other DNA

SEQ ID NO: 210876 - DNA, 80 bp, synthetic construct; identical to SEQ ID NO: 26146
  source 1..80: mol_type = other DNA

SEQ ID NO: 210877 - DNA, 80 bp, synthetic construct; identical to SEQ ID NO: 26147
  source 1..80: mol_type = other DNA

SEQ ID NO: 210878 - DNA, 80 bp, synthetic construct; identical to SEQ ID NO: 26148
  source 1..80: mol_type = other DNA

SEQ ID NO: 210879 - DNA, 80 bp, synthetic construct; identical to SEQ ID NO: 26149
  source 1..80: mol_type = other DNA

SEQ ID NO: 210880 - DNA, 80 bp, synthetic construct; identical to SEQ ID NO: 26150
  source 1..80: mol_type = other DNA

SEQ ID NO: 210881 - DNA, 80 bp, synthetic construct; identical to SEQ ID NO: 26151
  source 1..80: mol_type = other DNA

SEQ ID NO: 210882 - DNA, 80 bp, synthetic construct; identical to SEQ ID NO: 26152
  source 1..80: mol_type = other DNA

SEQ ID NO: 210883 - DNA, 80 bp, synthetic construct; identical to SEQ ID NO: 26153
  source 1..80: mol_type = other DNA

SEQ ID NO: 210884 - DNA, 80 bp, synthetic construct; identical to SEQ ID NO: 26154
  source 1..80: mol_type = other DNA

SEQ ID NO: 210885 - DNA, 80 bp, synthetic construct; identical to SEQ ID NO: 26155
  source 1..80: mol_type = other DNA

SEQ ID NO: 210886 - DNA, 80 bp, synthetic construct; identical to SEQ ID NO: 26156
  source 1..80: mol_type = other DNA

SEQ ID NO: 210887 - DNA, 80 bp, synthetic construct; identical to SEQ ID NO: 26157
  source 1..80: mol_type = other DNA

SEQ ID NO: 210888 - DNA, 80 bp, synthetic construct; identical to SEQ ID NO: 26158
  source 1..80: mol_type = other DNA

SEQ ID NO: 210889 - DNA, 80 bp, synthetic construct; identical to SEQ ID NO: 26159
  source 1..80: mol_type = other DNA

SEQ ID NO: 210890 - DNA, 80 bp, synthetic construct; identical to SEQ ID NO: 26160
  source 1..80: mol_type = other DNA

SEQ ID NO: 210891 - DNA, 80 bp, synthetic construct; identical to SEQ ID NO: 26161
  source 1..80: mol_type = other DNA

SEQ ID NO: 210892 - DNA, 80 bp, synthetic construct; identical to SEQ ID NO: 26162
  source 1..80: mol_type = other DNA

SEQ ID NO: 210893 - DNA, 80 bp, synthetic construct; identical to SEQ ID NO: 26163
  source 1..80: mol_type = other DNA

SEQ ID NO: 210894 - DNA, 80 bp, synthetic construct; identical to SEQ ID NO: 26164
  source 1..80: mol_type = other DNA

SEQ ID NO: 210895 - DNA, 80 bp, synthetic construct; identical to SEQ ID NO: 26165
  source 1..80: mol_type = other DNA

SEQ ID NO: 210896 - DNA, 80 bp, synthetic construct; identical to SEQ ID NO: 26166
  source 1..80: mol_type = other DNA

SEQ ID NO: 210897 - DNA, 80 bp, synthetic construct; identical to SEQ ID NO: 26167
  source 1..80: mol_type = other DNA

SEQ ID NO: 210898 - DNA, 80 bp, synthetic construct; identical to SEQ ID NO: 26168
  source 1..80: mol_type = other DNA

SEQ ID NO: 210899 - DNA, 80 bp, synthetic construct; identical to SEQ ID NO: 26169
  source 1..80: mol_type = other DNA

SEQ ID NO: 210900 - DNA, 80 bp, synthetic construct; identical to SEQ ID NO: 26170
  source 1..80: mol_type = other DNA

SEQ ID NO: 210901 - DNA, 80 bp, synthetic construct; identical to SEQ ID NO: 26171
  source 1..80: mol_type = other DNA

SEQ ID NO: 210902 - DNA, 80 bp, synthetic construct; identical to SEQ ID NO: 26172
  source 1..80: mol_type = other DNA

SEQ ID NO: 210903 - DNA, 80 bp, synthetic construct; identical to SEQ ID NO: 26173
  source 1..80: mol_type = other DNA

SEQ ID NO: 210904 - DNA, 80 bp, synthetic construct; identical to SEQ ID NO: 26174
  source 1..80: mol_type = other DNA

SEQ ID NO: 210905 - DNA, 80 bp, synthetic construct; identical to SEQ ID NO: 26175
  source 1..80: mol_type = other DNA

SEQ ID NO: 210906 - DNA, 80 bp, synthetic construct; identical to SEQ ID NO: 26176
  source 1..80: mol_type = other DNA

SEQ ID NO: 210907 - DNA, 80 bp, synthetic construct; identical to SEQ ID NO: 26177
  source 1..80: mol_type = other DNA

SEQ ID NO: 210908 - DNA, 80 bp, synthetic construct; identical to SEQ ID NO: 26178
  source 1..80: mol_type = other DNA

SEQ ID NO: 210909 - DNA, 80 bp, synthetic construct; identical to SEQ ID NO: 26179
  source 1..80: mol_type = other DNA

SEQ ID NO: 210910 - DNA, 80 bp, synthetic construct; identical to SEQ ID NO: 26180
  source 1..80: mol_type = other DNA

SEQ ID NO: 210911 - DNA, 80 bp, synthetic construct; identical to SEQ ID NO: 26181
  source 1..80: mol_type = other DNA

SEQ ID NO: 210912 - DNA, 80 bp, synthetic construct; identical to SEQ ID NO: 26182
  source 1..80: mol_type = other DNA

SEQ ID NO: 210913 - DNA, 80 bp, synthetic construct; identical to SEQ ID NO: 26183
  source 1..80: mol_type = other DNA

SEQ ID NO: 210914 - DNA, 80 bp, synthetic construct; identical to SEQ ID NO: 26184
  source 1..80: mol_type = other DNA

SEQ ID NO: 210915 - DNA, 80 bp, synthetic construct; identical to SEQ ID NO: 26185
  source 1..80: mol_type = other DNA

SEQ ID NO: 210916 - DNA, 80 bp, synthetic construct; identical to SEQ ID NO: 26186
  source 1..80: mol_type = other DNA

SEQ ID NO: 210917 - DNA, 80 bp, synthetic construct; identical to SEQ ID NO: 26187
  source 1..80: mol_type = other DNA

SEQ ID NO: 210918 - DNA, 80 bp, synthetic construct; identical to SEQ ID NO: 26188
  source 1..80: mol_type = other DNA

SEQ ID NO: 210919 - DNA, 80 bp, synthetic construct; identical to SEQ ID NO: 26189
  source 1..80: mol_type = other DNA

SEQ ID NO: 210920 - DNA, 80 bp, synthetic construct; identical to SEQ ID NO: 26190
  source 1..80: mol_type = other DNA

SEQ ID NO: 210921 - DNA, 80 bp, synthetic construct; identical to SEQ ID NO: 26191
  source 1..80: mol_type = other DNA

SEQ ID NO: 210922 - DNA, 80 bp, synthetic construct; identical to SEQ ID NO: 26192
  source 1..80: mol_type = other DNA

SEQ ID NO: 210923 - DNA, 80 bp, synthetic construct; identical to SEQ ID NO: 26193
  source 1..80: mol_type = other DNA

SEQ ID NO: 210924 - DNA, 80 bp, synthetic construct; identical to SEQ ID NO: 26194
  source 1..80: mol_type = other DNA

SEQ ID NO: 210925 - DNA, 80 bp, synthetic construct; identical to SEQ ID NO: 26195
  source 1..80: mol_type = other DNA

SEQ ID NO: 210926 - DNA, 80 bp, synthetic construct; identical to SEQ ID NO: 26196
  source 1..80: mol_type = other DNA

SEQ ID NO: 210927 - DNA, 80 bp, synthetic construct; identical to SEQ ID NO: 26197
  source 1..80: mol_type = other DNA

SEQ ID NO: 210928 - DNA, 80 bp, synthetic construct; identical to SEQ ID NO: 26198
  source 1..80: mol_type = other DNA

SEQ ID NO: 210929 - DNA, 80 bp, synthetic construct; identical to SEQ ID NO: 26199
  source 1..80: mol_type = other DNA

SEQ ID NO: 210930 - DNA, 80 bp, synthetic construct; identical to SEQ ID NO: 26200
  source 1..80: mol_type = other DNA

SEQ ID NO: 210931 - DNA, 80 bp, synthetic construct; identical to SEQ ID NO: 26201
  source 1..80: mol_type = other DNA

SEQ ID NO: 210932 - DNA, 80 bp, synthetic construct; identical to SEQ ID NO: 26202
  source 1..80: mol_type = other DNA

SEQ ID NO: 210933 - DNA, 80 bp, synthetic construct; identical to SEQ ID NO: 26203
  source 1..80: mol_type = other DNA

SEQ ID NO: 210934 - DNA, 80 bp, synthetic construct; identical to SEQ ID NO: 26204
  source 1..80: mol_type = other DNA

SEQ ID NO: 210935 - DNA, 80 bp, synthetic construct; identical to SEQ ID NO: 26205
  source 1..80: mol_type = other DNA

SEQ ID NO: 210936 - DNA, 80 bp, synthetic construct; identical to SEQ ID NO: 26206
  source 1..80: mol_type = other DNA

SEQ ID NO: 210937 - DNA, 80 bp, synthetic construct; identical to SEQ ID NO: 26207
  source 1..80: mol_type = other DNA

SEQ ID NO: 210938 - DNA, 80 bp, synthetic construct; identical to SEQ ID NO: 26208
  source 1..80: mol_type = other DNA

SEQ ID NO: 210939 - DNA, 80 bp, synthetic construct; identical to SEQ ID NO: 26209
  source 1..80: mol_type = other DNA

SEQ ID NO: 210940 - DNA, 80 bp, synthetic construct; identical to SEQ ID NO: 26210
  source 1..80: mol_type = other DNA

SEQ ID NO: 210941 - DNA, 80 bp, synthetic construct; identical to SEQ ID NO: 26211
  source 1..80: mol_type = other DNA

SEQ ID NO: 210942 - DNA, 80 bp, synthetic construct; identical to SEQ ID NO: 26212
  source 1..80: mol_type = other DNA

SEQ ID NO: 210943 - DNA, 80 bp, synthetic construct; identical to SEQ ID NO: 26213
  source 1..80: mol_type = other DNA

SEQ ID NO: 210944 - DNA, 80 bp, synthetic construct; identical to SEQ ID NO: 26214
  source 1..80: mol_type = other DNA

SEQ ID NO: 210945 - DNA, 80 bp, synthetic construct; identical to SEQ ID NO: 26215
  source 1..80: mol_type = other DNA

SEQ ID NO: 210946 - DNA, 80 bp, synthetic construct; identical to SEQ ID NO: 26216
  source 1..80: mol_type = other DNA

SEQ ID NO: 210947 - DNA, 80 bp, synthetic construct; identical to SEQ ID NO: 26217
  source 1..80: mol_type = other DNA

SEQ ID NO: 210948 - DNA, 80 bp, synthetic construct; identical to SEQ ID NO: 26218
  source 1..80: mol_type = other DNA

SEQ ID NO: 210949 - DNA, 80 bp, synthetic construct; identical to SEQ ID NO: 26219
  source 1..80: mol_type = other DNA

SEQ ID NO: 210950 - DNA, 80 bp, synthetic construct; identical to SEQ ID NO: 26220
  source 1..80: mol_type = other DNA

SEQ ID NO: 210951 - DNA, 80 bp, synthetic construct; identical to SEQ ID NO: 26221
  source 1..80: mol_type = other DNA

SEQ ID NO: 210952 - DNA, 80 bp, synthetic construct; identical to SEQ ID NO: 26222
  source 1..80: mol_type = other DNA

SEQ ID NO: 210953 - DNA, 80 bp, synthetic construct; identical to SEQ ID NO: 26223
  source 1..80: mol_type = other DNA

SEQ ID NO: 210954 - DNA, 80 bp, synthetic construct; identical to SEQ ID NO: 26224
  source 1..80: mol_type = other DNA

SEQ ID NO: 210955 - DNA, 80 bp, synthetic construct; identical to SEQ ID NO: 26225
  source 1..80: mol_type = other DNA

SEQ ID NO: 210956 - DNA, 80 bp, synthetic construct; identical to SEQ ID NO: 26226
  source 1..80: mol_type = other DNA

SEQ ID NO: 210957 - DNA, 80 bp, synthetic construct; identical to SEQ ID NO: 26227
  source 1..80: mol_type = other DNA

SEQ ID NO: 210958 - DNA, 80 bp, synthetic construct; identical to SEQ ID NO: 26228
  source 1..80: mol_type = other DNA

SEQ ID NO: 210959 - DNA, 80 bp, synthetic construct; identical to SEQ ID NO: 26229
  source 1..80: mol_type = other DNA

SEQ ID NO: 210960 - DNA, 80 bp, synthetic construct; identical to SEQ ID NO: 26230
  source 1..80: mol_type = other DNA

SEQ ID NO: 210961 - DNA, 80 bp, synthetic construct; identical to SEQ ID NO: 26231
  source 1..80: mol_type = other DNA

SEQ ID NO: 210962 - DNA, 80 bp, synthetic construct; identical to SEQ ID NO: 26232
  source 1..80: mol_type = other DNA

SEQ ID NO: 210963 - DNA, 80 bp, synthetic construct; identical to SEQ ID NO: 26233
  source 1..80: mol_type = other DNA

SEQ ID NO: 210964 - DNA, 80 bp, synthetic construct; identical to SEQ ID NO: 26234
  source 1..80: mol_type = other DNA

SEQ ID NO: 210965 - DNA, 80 bp, synthetic construct; identical to SEQ ID NO: 26235
  source 1..80: mol_type = other DNA

SEQ ID NO: 210966 - DNA, 80 bp, synthetic construct; identical to SEQ ID NO: 26236
  source 1..80: mol_type = other DNA

SEQ ID NO: 210967 - DNA, 80 bp, synthetic construct; identical to SEQ ID NO: 26237
  source 1..80: mol_type = other DNA

SEQ ID NO: 210968 - DNA, 80 bp, synthetic construct; identical to SEQ ID NO: 26238
  source 1..80: mol_type = other DNA

SEQ ID NO: 210969 - DNA, 80 bp, synthetic construct; identical to SEQ ID NO: 26239
  source 1..80: mol_type = other DNA

SEQ ID NO: 210970 - DNA, 80 bp, synthetic construct; identical to SEQ ID NO: 26240
  source 1..80: mol_type = other DNA

SEQ ID NO: 210971 - DNA, 80 bp, synthetic construct; identical to SEQ ID NO: 26241
  source 1..80: mol_type = other DNA

SEQ ID NO: 210972 - DNA, 80 bp, synthetic construct; identical to SEQ ID NO: 26242
  source 1..80: mol_type = other DNA

SEQ ID NO: 210973 - DNA, 80 bp, synthetic construct; identical to SEQ ID NO: 26243
  source 1..80: mol_type = other DNA

SEQ ID NO: 210974 - DNA, 80 bp, synthetic construct; identical to SEQ ID NO: 26244
  source 1..80: mol_type = other DNA

SEQ ID NO: 210975 - DNA, 80 bp, synthetic construct; identical to SEQ ID NO: 26245
  source 1..80: mol_type = other DNA

SEQ ID NO: 210976 - DNA, 80 bp, synthetic construct; identical to SEQ ID NO: 26246
  source 1..80: mol_type = other DNA

SEQ ID NO: 210977 - DNA, 80 bp, synthetic construct; identical to SEQ ID NO: 26247
  source 1..80: mol_type = other DNA

SEQ ID NO: 210978 - DNA, 80 bp, synthetic construct; identical to SEQ ID NO: 26248
  source 1..80: mol_type = other DNA

SEQ ID NO: 210979 - DNA, 80 bp, synthetic construct; identical to SEQ ID NO: 26249
  source 1..80: mol_type = other DNA

SEQ ID NO: 210980 - DNA, 80 bp, synthetic construct; identical to SEQ ID NO: 26250
  source 1..80: mol_type = other DNA

SEQ ID NO: 210981 - DNA, 80 bp, synthetic construct; identical to SEQ ID NO: 26251
  source 1..80: mol_type = other DNA

SEQ ID NO: 210982 - DNA, 80 bp, synthetic construct; identical to SEQ ID NO: 26252
  source 1..80: mol_type = other DNA

SEQ ID NO: 210983 - DNA, 80 bp, synthetic construct; identical to SEQ ID NO: 26253
  source 1..80: mol_type = other DNA

SEQ ID NO: 210984 - DNA, 80 bp, synthetic construct; identical to SEQ ID NO: 26254
  source 1..80: mol_type = other DNA

SEQ ID NO: 210985 - DNA, 80 bp, synthetic construct; identical to SEQ ID NO: 26255
  source 1..80: mol_type = other DNA

SEQ ID NO: 210986 - DNA, 80 bp, synthetic construct; identical to SEQ ID NO: 26256
  source 1..80: mol_type = other DNA

SEQ ID NO: 210987 - DNA, 80 bp, synthetic construct; identical to SEQ ID NO: 26257
  source 1..80: mol_type = other DNA

SEQ ID NO: 210988 - DNA, 80 bp, synthetic construct; identical to SEQ ID NO: 26258
  source 1..80: mol_type = other DNA

SEQ ID NO: 210989 - DNA, 80 bp, synthetic construct; identical to SEQ ID NO: 26259
  source 1..80: mol_type = other DNA

SEQ ID NO: 210990 - DNA, 80 bp, synthetic construct; identical to SEQ ID NO: 26260
  source 1..80: mol_type = other DNA

SEQ ID NO: 210991 - DNA, 80 bp, synthetic construct; identical to SEQ ID NO: 26261
  source 1..80: mol_type = other DNA

SEQ ID NO: 210992 - DNA, 80 bp, synthetic construct; identical to SEQ ID NO: 26262
  source 1..80: mol_type = other DNA

SEQ ID NO: 210993 - DNA, 80 bp, synthetic construct; identical to SEQ ID NO: 26263
  source 1..80: mol_type = other DNA

SEQ ID NO: 210994 - DNA, 80 bp, synthetic construct; identical to SEQ ID NO: 26264
  source 1..80: mol_type = other DNA

SEQ ID NO: 210995 - DNA, 80 bp, synthetic construct; identical to SEQ ID NO: 26265
  source 1..80: mol_type = other DNA

SEQ ID NO: 210996 - DNA, 80 bp, synthetic construct; identical to SEQ ID NO: 26266
  source 1..80: mol_type = other DNA

SEQ ID NO: 210997 - DNA, 80 bp, synthetic construct; identical to SEQ ID NO: 26267
  source 1..80: mol_type = other DNA

SEQ ID NO: 210998 - DNA, 80 bp, synthetic construct; identical to SEQ ID NO: 26268
  source 1..80: mol_type = other DNA

SEQ ID NO: 210999 - DNA, 80 bp, synthetic construct; identical to SEQ ID NO: 26269
  source 1..80: mol_type = other DNA

SEQ ID NO: 211000 - DNA, 80 bp, synthetic construct; identical to SEQ ID NO: 26270
  source 1..80: mol_type = other DNA

SEQ ID NO: 211001 - DNA, 80 bp, synthetic construct; identical to SEQ ID NO: 26271
  source 1..80: mol_type = other DNA

SEQ ID NO: 211002 - DNA, 80 bp, synthetic construct; identical to SEQ ID NO: 26272
  source 1..80: mol_type = other DNA

SEQ ID NO: 211003 - DNA, 80 bp, synthetic construct; identical to SEQ ID NO: 26273
  source 1..80: mol_type = other DNA

SEQ ID NO: 211004 - DNA, 80 bp, synthetic construct; identical to SEQ ID NO: 26274
  source 1..80: mol_type = other DNA

SEQ ID NO: 211005 - DNA, 80 bp, synthetic construct; identical to SEQ ID NO: 26275
  source 1..80: mol_type = other DNA

SEQ ID NO: 211006 - DNA, 80 bp, synthetic construct; identical to SEQ ID NO: 26276
  source 1..80: mol_type = other DNA

SEQ ID NO: 211007 - DNA, 80 bp, synthetic construct; identical to SEQ ID NO: 26277
  source 1..80: mol_type = other DNA

SEQ ID NO: 211008 - DNA, 80 bp, synthetic construct; identical to SEQ ID NO: 26278
  source 1..80: mol_type = other DNA

SEQ ID NO: 211009 - DNA, 80 bp, synthetic construct; identical to SEQ ID NO: 26279
  source 1..80: mol_type = other DNA

SEQ ID NO: 211010 - DNA, 80 bp, synthetic construct; identical to SEQ ID NO: 26280
  source 1..80: mol_type = other DNA

SEQ ID NO: 211011 - DNA, 80 bp, synthetic construct; identical to SEQ ID NO: 26281
  source 1..80: mol_type = other DNA

SEQ ID NO: 211012 - DNA, 80 bp, synthetic construct; identical to SEQ ID NO: 26282
  source 1..80: mol_type = other DNA

SEQ ID NO: 211013 - DNA, 80 bp, synthetic construct; identical to SEQ ID NO: 26283
  source 1..80: mol_type = other DNA

SEQ ID NO: 211014 - DNA, 80 bp, synthetic construct; identical to SEQ ID NO: 26284
  source 1..80: mol_type = other DNA

SEQ ID NO: 211015 - DNA, 80 bp, synthetic construct; identical to SEQ ID NO: 26285
  source 1..80: mol_type = other DNA

SEQ ID NO: 211016 - DNA, 80 bp, synthetic construct; identical to SEQ ID NO: 26286
  source 1..80: mol_type = other DNA

SEQ ID NO: 211017 - DNA, 80 bp, synthetic construct; identical to SEQ ID NO: 26287
  source 1..80: mol_type = other DNA

SEQ ID NO: 211018 - DNA, 80 bp, synthetic construct; identical to SEQ ID NO: 26288
  source 1..80: mol_type = other DNA

SEQ ID NO: 211019 - DNA, 80 bp, synthetic construct; identical to SEQ ID NO: 26289
  source 1..80: mol_type = other DNA

SEQ ID NO: 211020 - DNA, 80 bp, synthetic construct; identical to SEQ ID NO: 26290
  source 1..80: mol_type = other DNA

SEQ ID NO: 211021 - DNA, 80 bp, synthetic construct; identical to SEQ ID NO: 26291
  source 1..80: mol_type = other DNA

SEQ ID NO: 211022 - DNA, 80 bp, synthetic construct; identical to SEQ ID NO: 26292
  source 1..80: mol_type = other DNA

SEQ ID NO: 211023 - DNA, 80 bp, synthetic construct; identical to SEQ ID NO: 26293
  source 1..80: mol_type = other DNA

SEQ ID NO: 211024 - DNA, 80 bp, synthetic construct; identical to SEQ ID NO: 26294
  source 1..80: mol_type = other DNA

SEQ ID NO: 211025 - DNA, 80 bp, synthetic construct; identical to SEQ ID NO: 26295
  source 1..80: mol_type = other DNA

SEQ ID NO: 211026 - DNA, 80 bp, synthetic construct; identical to SEQ ID NO: 26296
  source 1..80: mol_type = other DNA

SEQ ID NO: 211027 - DNA, 80 bp, synthetic construct; identical to SEQ ID NO: 26297
  source 1..80: mol_type = other DNA

SEQ ID NO: 211028 - DNA, 80 bp, synthetic construct; identical to SEQ ID NO: 26298
  source 1..80: mol_type = other DNA

SEQ ID NO: 211029 - DNA, 80 bp, synthetic construct; identical to SEQ ID NO: 26299
  source 1..80: mol_type = other DNA

SEQ ID NO: 211030 - DNA, 80 bp, synthetic construct; identical to SEQ ID NO: 26300
  source 1..80: mol_type = other DNA

SEQ ID NO: 211031 - DNA, 80 bp, synthetic construct; identical to SEQ ID NO: 26301
  source 1..80: mol_type = other DNA

SEQ ID NO: 211032 - DNA, 80 bp, synthetic construct; identical to SEQ ID NO: 26302
  source 1..80: mol_type = other DNA

SEQ ID NO: 211033 - DNA, 80 bp, synthetic construct; identical to SEQ ID NO: 26303
  source 1..80: mol_type = other DNA

SEQ ID NO: 211034 - DNA, 80 bp, synthetic construct; identical to SEQ ID NO: 26304
  source 1..80: mol_type = other DNA

SEQ ID NO: 211035 - DNA, 80 bp, synthetic construct; identical to SEQ ID NO: 26305
  source 1..80: mol_type = other DNA

SEQ ID NO: 211036 - DNA, 80 bp, synthetic construct; identical to SEQ ID NO: 26306
  source 1..80: mol_type = other DNA

SEQ ID NO: 211037 - DNA, 80 bp, synthetic construct; identical to SEQ ID NO: 26307
  source 1..80: mol_type = other DNA

SEQ ID NO: 211038 - DNA, 80 bp, synthetic construct; identical to SEQ ID NO: 26308
  source 1..80: mol_type = other DNA

SEQ ID NO: 211039 - DNA, 80 bp, synthetic construct; identical to SEQ ID NO: 26309
  source 1..80: mol_type = other DNA

SEQ ID NO: 211040 - DNA, 80 bp, synthetic construct; identical to SEQ ID NO: 26310
  source 1..80: mol_type = other DNA

SEQ ID NO: 211041 - DNA, 80 bp, synthetic construct; identical to SEQ ID NO: 26311
  source 1..80: mol_type = other DNA

SEQ ID NO: 211042 - DNA, 80 bp, synthetic construct; identical to SEQ ID NO: 26312
  source 1..80: mol_type = other DNA

SEQ ID NO: 211043 - DNA, 80 bp, synthetic construct; identical to SEQ ID NO: 26313
  source 1..80: mol_type = other DNA

SEQ ID NO: 211044 - DNA, 80 bp, synthetic construct; identical to SEQ ID NO: 26314
  source 1..80: mol_type = other DNA

SEQ ID NO: 211045 - DNA, 80 bp, synthetic construct; identical to SEQ ID NO: 26315
  source 1..80: mol_type = other DNA

SEQ ID NO: 211046 - DNA, 80 bp, synthetic construct; identical to SEQ ID NO: 26316
  source 1..80: mol_type = other DNA

SEQ ID NO: 211047 - DNA, 80 bp, synthetic construct; identical to SEQ ID NO: 26317
  source 1..80: mol_type = other DNA

SEQ ID NO: 211048 - DNA, 80 bp, synthetic construct; identical to SEQ ID NO: 26318
  source 1..80: mol_type = other DNA

SEQ ID NO: 211049 - DNA, 80 bp, synthetic construct; identical to SEQ ID NO: 26319
  source 1..80: mol_type = other DNA

SEQ ID NO: 211050 - DNA, 80 bp, synthetic construct; identical to SEQ ID NO: 26320
  source 1..80: mol_type = other DNA

SEQ ID NO: 211051 - DNA, 80 bp, synthetic construct; identical to SEQ ID NO: 26321
  source 1..80: mol_type = other DNA

SEQ ID NO: 211052 - DNA, 80 bp, synthetic construct; identical to SEQ ID NO: 26322
  source 1..80: mol_type = other DNA

SEQ ID NO: 211053 - DNA, 80 bp, synthetic construct; identical to SEQ ID NO: 26323
  source 1..80: mol_type = other DNA

SEQ ID NO: 211054 - DNA, 80 bp, synthetic construct; identical to SEQ ID NO: 26324
  source 1..80: mol_type = other DNA

SEQ ID NO: 211055 - DNA, 80 bp, synthetic construct; identical to SEQ ID NO: 26325
  source 1..80: mol_type = other DNA

SEQ ID NO: 211056 - DNA, 80 bp, synthetic construct; identical to SEQ ID NO: 26326
  source 1..80: mol_type = other DNA

SEQ ID NO: 211057 - DNA, 80 bp, synthetic construct; identical to SEQ ID NO: 26327
  source 1..80: mol_type = other DNA

SEQ ID NO: 211058 - DNA, 80 bp, synthetic construct; identical to SEQ ID NO: 26328
  source 1..80: mol_type = other DNA

SEQ ID NO: 211059 - DNA, 80 bp, synthetic construct; identical to SEQ ID NO: 26329
  source 1..80: mol_type = other DNA

SEQ ID NO: 211060 - DNA, 80 bp, synthetic construct; identical to SEQ ID NO: 26330
  source 1..80: mol_type = other DNA

SEQ ID NO: 211061 - DNA, 80 bp, synthetic construct; identical to SEQ ID NO: 26331
  source 1..80: mol_type = other DNA

SEQ ID NO: 211062 - DNA, 80 bp, synthetic construct; identical to SEQ ID NO: 26332
  source 1..80: mol_type = other DNA

SEQ ID NO: 211063 - DNA, 80 bp, synthetic construct; identical to SEQ ID NO: 26333
  source 1..80: mol_type = other DNA

SEQ ID NO: 211064 - DNA, 80 bp, synthetic construct; identical to SEQ ID NO: 26334
  source 1..80: mol_type = other DNA

SEQ ID NO: 211065 - DNA, 80 bp, synthetic construct; identical to SEQ ID NO: 26335
  source 1..80: mol_type = other DNA

SEQ ID NO: 211066 - DNA, 80 bp, synthetic construct; identical to SEQ ID NO: 26336
  source 1..80: mol_type = other DNA

SEQ ID NO: 211067 - DNA, 80 bp, synthetic construct; identical to SEQ ID NO: 26337
  source 1..80: mol_type = other DNA

SEQ ID NO: 211068 - DNA, 80 bp, synthetic construct; identical to SEQ ID NO: 26338
  source 1..80: mol_type = other DNA

SEQ ID NO: 211069 - DNA, 80 bp, synthetic construct; identical to SEQ ID NO: 26339
  source 1..80: mol_type = other DNA

SEQ ID NO: 211070 - DNA, 80 bp, synthetic construct; identical to SEQ ID NO: 26340
  source 1..80: mol_type = other DNA

SEQ ID NO: 211071 - DNA, 80 bp, synthetic construct; identical to SEQ ID NO: 26341
  source 1..80: mol_type = other DNA

SEQ ID NO: 211072 - DNA, 80 bp, synthetic construct; identical to SEQ ID NO: 26342
  source 1..80: mol_type = other DNA

SEQ ID NO: 211073 - DNA, 80 bp, synthetic construct; identical to SEQ ID NO: 26343
  source 1..80: mol_type = other DNA

SEQ ID NO: 211074 - DNA, 80 bp, synthetic construct; identical to SEQ ID NO: 26344
  source 1..80: mol_type = other DNA

SEQ ID NO: 211075 - DNA, 80 bp, synthetic construct; identical to SEQ ID NO: 26345
  source 1..80: mol_type = other DNA

SEQ ID NO: 211076 - DNA, 80 bp, synthetic construct; identical to SEQ ID NO: 26346
  source 1..80: mol_type = other DNA

SEQ ID NO: 211077 - DNA, 80 bp, synthetic construct; identical to SEQ ID NO: 26347
  source 1..80: mol_type = other DNA

SEQ ID NO: 211078 - DNA, 80 bp, synthetic construct; identical to SEQ ID NO: 26348
  source 1..80: mol_type = other DNA

SEQ ID NO: 211079 - DNA, 80 bp, synthetic construct; identical to SEQ ID NO: 26349
  source 1..80: mol_type = other DNA

SEQ ID NO: 211080 - DNA, 80 bp, synthetic construct; identical to SEQ ID NO: 26350
  source 1..80: mol_type = other DNA

SEQ ID NO: 211081 - DNA, 80 bp, synthetic construct; identical to SEQ ID NO: 26351
  source 1..80: mol_type = other DNA

SEQ ID NO: 211082 - DNA, 80 bp, synthetic construct; identical to SEQ ID NO: 26352
  source 1..80: mol_type = other DNA

SEQ ID NO: 211083 - DNA, 80 bp, synthetic construct; identical to SEQ ID NO: 26353
  source 1..80: mol_type = other DNA

SEQ ID NO: 211084 - DNA, 80 bp, synthetic construct; identical to SEQ ID NO: 26354
  source 1..80: mol_type = other DNA

SEQ ID NO: 211085 - DNA, 80 bp, synthetic construct; identical to SEQ ID NO: 26355
  source 1..80: mol_type = other DNA

SEQ ID NO: 211086 - DNA, 80 bp, synthetic construct; identical to SEQ ID NO: 26356
  source 1..80: mol_type = other DNA

SEQ ID NO: 211087 - DNA, 80 bp, synthetic construct; identical to SEQ ID NO: 26357
  source 1..80: mol_type = other DNA

SEQ ID NO: 211088 - DNA, 80 bp, synthetic construct; identical to SEQ ID NO: 26358
  source 1..80: mol_type = other DNA

SEQ ID NO: 211089 - DNA, 80 bp, synthetic construct; identical to SEQ ID NO: 26359
  source 1..80: mol_type = other DNA

SEQ ID NO: 211090 - DNA, 80 bp, synthetic construct; identical to SEQ ID NO: 26360
  source 1..80: mol_type = other DNA

SEQ ID NO: 211091 - DNA, 80 bp, synthetic construct; identical to SEQ ID NO: 26361
  source 1..80: mol_type = other DNA

SEQ ID NO: 211092 - DNA, 80 bp, synthetic construct; identical to SEQ ID NO: 26362
  source 1..80: mol_type = other DNA

SEQ ID NO: 211093 - DNA, 80 bp, synthetic construct; identical to SEQ ID NO: 26363
  source 1..80: mol_type = other DNA

SEQ ID NO: 211094 - DNA, 80 bp, synthetic construct; identical to SEQ ID NO: 26364
  source 1..80: mol_type = other DNA

SEQ ID NO: 211095 - DNA, 80 bp, synthetic construct; identical to SEQ ID NO: 26365
  source 1..80: mol_type = other DNA

SEQ ID NO: 211096 - DNA, 80 bp, synthetic construct; identical to SEQ ID NO: 26366
  source 1..80: mol_type = other DNA

SEQ ID NO: 211097 - DNA, 80 bp, synthetic construct; identical to SEQ ID NO: 26367
  source 1..80: mol_type = other DNA

SEQ ID NO: 211098 - DNA, 80 bp, synthetic construct; identical to SEQ ID NO: 26368
  source 1..80: mol_type = other DNA

SEQ ID NO: 211099 - DNA, 80 bp, synthetic construct; identical to SEQ ID NO: 26369
  source 1..80: mol_type = other DNA

SEQ ID NO: 211100 - DNA, 80 bp, synthetic construct; identical to SEQ ID NO: 26370
  source 1..80: mol_type = other DNA

SEQ ID NO: 211101 - DNA, 80 bp, synthetic construct; identical to SEQ ID NO: 26371
  source 1..80: mol_type = other DNA

SEQ ID NO: 211102 - DNA, 80 bp, synthetic construct; identical to SEQ ID NO: 26372
  source 1..80: mol_type = other DNA

SEQ ID NO: 211103 - DNA, 80 bp, synthetic construct; identical to SEQ ID NO: 26373
  source 1..80: mol_type = other DNA

SEQ ID NO: 211104 - DNA, 80 bp, synthetic construct; identical to SEQ ID NO: 26374
  source 1..80: mol_type = other DNA

SEQ ID NO: 211105 - DNA, 80 bp, synthetic construct; identical to SEQ ID NO: 26375
  source 1..80: mol_type = other DNA

SEQ ID NO: 211106 - DNA, 80 bp, synthetic construct; identical to SEQ ID NO: 26376
  source 1..80: mol_type = other DNA

SEQ ID NO: 211107 - DNA, 80 bp, synthetic construct; identical to SEQ ID NO: 26377
  source 1..80: mol_type = other DNA

SEQ ID NO: 211108 - DNA, 80 bp, synthetic construct; identical to SEQ ID NO: 26378
  source 1..80: mol_type = other DNA

SEQ ID NO: 211109 - DNA, 80 bp, synthetic construct; identical to SEQ ID NO: 26379
  source 1..80: mol_type = other DNA

SEQ ID NO: 211110 - DNA, 80 bp, synthetic construct; identical to SEQ ID NO: 26380
  source 1..80: mol_type = other DNA

SEQ ID NO: 211111 - DNA, 80 bp, synthetic construct; identical to SEQ ID NO: 26381
  source 1..80: mol_type = other DNA

SEQ ID NO: 211112 - DNA, 80 bp, synthetic construct; identical to SEQ ID NO: 26382
  source 1..80: mol_type = other DNA

SEQ ID NO: 211113 - DNA, 80 bp, synthetic construct; identical to SEQ ID NO: 26383
  source 1..80: mol_type = other DNA

SEQ ID NO: 211114 - DNA, 80 bp, synthetic construct; identical to SEQ ID NO: 26384
  source 1..80: mol_type = other DNA

SEQ ID NO: 211115 - DNA, 80 bp, synthetic construct; identical to SEQ ID NO: 26385
  source 1..80: mol_type = other DNA

SEQ ID NO: 211116 - DNA, 80 bp, synthetic construct; identical to SEQ ID NO: 26386
  source 1..80: mol_type = other DNA

SEQ ID NO: 211117 - DNA, 80 bp, synthetic construct; identical to SEQ ID NO: 26387
  source 1..80: mol_type = other DNA

SEQ ID NO: 211118 - DNA, 80 bp, synthetic construct; identical to SEQ ID NO: 26388
  source 1..80: mol_type = other DNA

SEQ ID NO: 211119 - DNA, 80 bp, synthetic construct; identical to SEQ ID NO: 26389
  source 1..80: mol_type = other DNA

SEQ ID NO: 211120 - DNA, 80 bp, synthetic construct; identical to SEQ ID NO: 26390
  source 1..80: mol_type = other DNA

SEQ ID NO: 211121 - DNA, 80 bp, synthetic construct; identical to SEQ ID NO: 26391
  source 1..80: mol_type = other DNA

SEQ ID NO: 211122 - DNA, 80 bp, synthetic construct; identical to SEQ ID NO: 26392
  source 1..80: mol_type = other DNA

SEQ ID NO: 211123 - DNA, 80 bp, synthetic construct; identical to SEQ ID NO: 26393
  source 1..80: mol_type = other DNA

SEQ ID NO: 211124 - DNA, 80 bp, synthetic construct; identical to SEQ ID NO: 26394
  source 1..80: mol_type = other DNA

SEQ ID NO: 211125 - DNA, 80 bp, synthetic construct; identical to SEQ ID NO: 26395
  source 1..80: mol_type = other DNA

SEQ ID NO: 211126 - DNA, 80 bp, synthetic construct; identical to SEQ ID NO: 26396
  source 1..80: mol_type = other DNA

SEQ ID NO: 211127 - DNA, 80 bp, synthetic construct; identical to SEQ ID NO: 26397
  source 1..80: mol_type = other DNA

SEQ ID NO: 211128 - DNA, 80 bp, synthetic construct; identical to SEQ ID NO: 26398
  source 1..80: mol_type = other DNA

SEQ ID NO: 211129 - DNA, 80 bp, synthetic construct; identical to SEQ ID NO: 26399
  source 1..80: mol_type = other DNA

SEQ ID NO: 211130 - DNA, 80 bp, synthetic construct; identical to SEQ ID NO: 26400
  source 1..80: mol_type = other DNA

SEQ ID NO: 211131 - DNA, 80 bp, synthetic construct; identical to SEQ ID NO: 26401
  source 1..80: mol_type = other DNA

SEQ ID NO: 211132 - DNA, 80 bp, synthetic construct; identical to SEQ ID NO: 26402
  source 1..80: mol_type = other DNA

SEQ ID NO: 211133 - DNA, 80 bp, synthetic construct; identical to SEQ ID NO: 26403
  source 1..80: mol_type = other DNA

SEQ ID NO: 211134 - DNA, 80 bp, synthetic construct; identical to SEQ ID NO: 26404
  source 1..80: mol_type = other DNA

SEQ ID NO: 211135 - DNA, 80 bp, synthetic construct; identical to SEQ ID NO: 26405
  source 1..80: mol_type = other DNA

SEQ ID NO: 211136 - DNA, 80 bp, synthetic construct; identical to SEQ ID NO: 26406
  source 1..80: mol_type = other DNA

SEQ ID NO: 211137 - DNA, 80 bp, synthetic construct; identical to SEQ ID NO: 26407
  source 1..80: mol_type = other DNA

SEQ ID NO: 211138 - DNA, 80 bp, synthetic construct; identical to SEQ ID NO: 26408
  source 1..80: mol_type = other DNA

SEQ ID NO: 211139 - DNA, 80 bp, synthetic construct; identical to SEQ ID NO: 26409
  source 1..80: mol_type = other DNA

SEQ ID NO: 211140 - DNA, 80 bp, synthetic construct; identical to SEQ ID NO: 26410
  source 1..80: mol_type = other DNA

SEQ ID NO: 211141 - DNA, 80 bp, synthetic construct; identical to SEQ ID NO: 26411
  source 1..80: mol_type = other DNA

SEQ ID NO: 211142 - DNA, 80 bp, synthetic construct; identical to SEQ ID NO: 26412
  source 1..80: mol_type = other DNA

SEQ ID NO: 211143 - DNA, 80 bp, synthetic construct; identical to SEQ ID NO: 26413
  source 1..80: mol_type = other DNA

SEQ ID NO: 211144 - DNA, 80 bp, synthetic construct; identical to SEQ ID NO: 26414
  source 1..80: mol_type = other DNA

SEQ ID NO: 211145 - DNA, 80 bp, synthetic construct; identical to SEQ ID NO: 26415
  source 1..80: mol_type = other DNA

SEQ ID NO: 211146 - DNA, 80 bp, synthetic construct; identical to SEQ ID NO: 26416
  source 1..80: mol_type = other DNA

SEQ ID NO: 211147 - DNA, 80 bp, synthetic construct; identical to SEQ ID NO: 26417
  source 1..80: mol_type = other DNA

SEQ ID NO: 211148 - DNA, 80 bp, synthetic construct; identical to SEQ ID NO: 26418
  source 1..80: mol_type = other DNA

SEQ ID NO: 211149 - DNA, 80 bp, synthetic construct; identical to SEQ ID NO: 26419
  source 1..80: mol_type = other DNA

SEQ ID NO: 211150 - DNA, 80 bp, synthetic construct; identical to SEQ ID NO: 26420
  source 1..80: mol_type = other DNA

SEQ ID NO: 211151 - DNA, 80 bp, synthetic construct; identical to SEQ ID NO: 26421
  source 1..80: mol_type = other DNA

SEQ ID NO: 211152 - DNA, 80 bp, synthetic construct; identical to SEQ ID NO: 26422
  source 1..80: mol_type = other DNA

SEQ ID NO: 211153 - DNA, 80 bp, synthetic construct; identical to SEQ ID NO: 26423
  source 1..80: mol_type = other DNA

SEQ ID NO: 211154 - DNA, 80 bp, synthetic construct; identical to SEQ ID NO: 26424
  source 1..80: mol_type = other DNA

SEQ ID NO: 211155 - DNA, 80 bp, synthetic construct; identical to SEQ ID NO: 26425
  source 1..80: mol_type = other DNA

SEQ ID NO: 211156 - DNA, 80 bp, synthetic construct; identical to SEQ ID NO: 26426
  source 1..80: mol_type = other DNA

SEQ ID NO: 211157 - DNA, 80 bp, synthetic construct; identical to SEQ ID NO: 26427
  source 1..80: mol_type = other DNA

SEQ ID NO: 211158 - DNA, 80 bp, synthetic construct; identical to SEQ ID NO: 26428
  source 1..80: mol_type = other DNA

SEQ ID NO: 211159 - DNA, 80 bp, synthetic construct; identical to SEQ ID NO: 26429
  source 1..80: mol_type = other DNA

SEQ ID NO: 211160 - DNA, 80 bp, synthetic construct; identical to SEQ ID NO: 26430
  source 1..80: mol_type = other DNA

SEQ ID NO: 211161 - DNA, 80 bp, synthetic construct; identical to SEQ ID NO: 26431
  source 1..80: mol_type = other DNA

SEQ ID NO: 211162 - DNA, 80 bp, synthetic construct; identical to SEQ ID NO: 26432
  source 1..80: mol_type = other DNA

SEQ ID NO: 211163 - DNA, 80 bp, synthetic construct; identical to SEQ ID NO: 26433
  source 1..80: mol_type = other DNA

SEQ ID NO: 211164 - DNA, 80 bp, synthetic construct; identical to SEQ ID NO: 26434
  source 1..80: mol_type = other DNA

SEQ ID NO: 211165 - DNA, 80 bp, synthetic construct; identical to SEQ ID NO: 26435
  source 1..80: mol_type = other DNA

SEQ ID NO: 211166 - DNA, 80 bp, synthetic construct; identical to SEQ ID NO: 26436
  source 1..80: mol_type = other DNA

SEQ ID NO: 211167 - DNA, 80 bp, synthetic construct; identical to SEQ ID NO: 26437
  source 1..80: mol_type = other DNA

SEQ ID NO: 211168 - DNA, 80 bp, synthetic construct; identical to SEQ ID NO: 26438
  source 1..80: mol_type = other DNA

SEQ ID NO: 211169 - DNA, 80 bp, synthetic construct; identical to SEQ ID NO: 26439
  source 1..80: mol_type = other DNA

SEQ ID NO: 211170 - DNA, 80 bp, synthetic construct; identical to SEQ ID NO: 26440
  source 1..80: mol_type = other DNA

SEQ ID NO: 211171 - DNA, 80 bp, synthetic construct; identical to SEQ ID NO: 26441
  source 1..80: mol_type = other DNA

SEQ ID NO: 211172 - DNA, 80 bp, synthetic construct; identical to SEQ ID NO: 26442
  source 1..80: mol_type = other DNA

SEQ ID NO: 211173 - DNA, 80 bp, synthetic construct; identical to SEQ ID NO: 26443
  source 1..80: mol_type = other DNA

SEQ ID NO: 211174 - DNA, 80 bp, synthetic construct; identical to SEQ ID NO: 26444
  source 1..80: mol_type = other DNA

SEQ ID NO: 211175 - DNA, 80 bp, synthetic construct; identical to SEQ ID NO: 26445
  source 1..80: mol_type = other DNA

SEQ ID NO: 211176 - DNA, 80 bp, synthetic construct; identical to SEQ ID NO: 26446
  source 1..80: mol_type = other DNA

SEQ ID NO: 211177 - DNA, 80 bp, synthetic construct; identical to SEQ ID NO: 26447
  source 1..80: mol_type = other DNA

SEQ ID NO: 211178 - DNA, 80 bp, synthetic construct; identical to SEQ ID NO: 26448
  source 1..80: mol_type = other DNA

SEQ ID NO: 211179 - DNA, 80 bp, synthetic construct; identical to SEQ ID NO: 26449
  source 1..80: mol_type = other DNA

SEQ ID NO: 211180 - DNA, 80 bp, synthetic construct; identical to SEQ ID NO: 26450
  source 1..80: mol_type = other DNA

SEQ ID NO: 211181 - DNA, 80 bp, synthetic construct; identical to SEQ ID NO: 26451
  source 1..80: mol_type = other DNA

SEQ ID NO: 211182 - DNA, 80 bp, synthetic construct; identical to SEQ ID NO: 26452
  source 1..80: mol_type = other DNA

SEQ ID NO: 211183 - DNA, 80 bp, synthetic construct; identical to SEQ ID NO: 26453
  source 1..80: mol_type = other DNA

SEQ ID NO: 211184 - DNA, 80 bp, synthetic construct; identical to SEQ ID NO: 26454
  source 1..80: mol_type = other DNA

SEQ ID NO: 211185 - DNA, 80 bp, synthetic construct; identical to SEQ ID NO: 26455
  source 1..80: mol_type = other DNA

SEQ ID NO: 211186 - DNA, 80 bp, synthetic construct; identical to SEQ ID NO: 26456
  source 1..80: mol_type = other DNA

SEQ ID NO: 211187 - DNA, 80 bp, synthetic construct; identical to SEQ ID NO: 26457
  source 1..80: mol_type = other DNA

SEQ ID NO: 211188 - DNA, 80 bp, synthetic construct; identical to SEQ ID NO: 26458
  source 1..80: mol_type = other DNA

SEQ ID NO: 211189 - DNA, 80 bp, synthetic construct; identical to SEQ ID NO: 26459
  source 1..80: mol_type = other DNA

SEQ ID NO: 211190 - DNA, 80 bp, synthetic construct; identical to SEQ ID NO: 26460
  source 1..80: mol_type = other DNA

SEQ ID NO: 211191 - DNA, 80 bp, synthetic construct; identical to SEQ ID NO: 26461
  source 1..80: mol_type = other DNA

SEQ ID NO: 211192 - DNA, 80 bp, synthetic construct; identical to SEQ ID NO: 26462
  source 1..80: mol_type = other DNA

SEQ ID NO: 211193 - DNA, 80 bp, synthetic construct; identical to SEQ ID NO: 26463
  source 1..80: mol_type = other DNA

SEQ ID NO: 211194 - DNA, 80 bp, synthetic construct; identical to SEQ ID NO: 26464
  source 1..80: mol_type = other DNA

SEQ ID NO: 211195 - DNA, 80 bp, synthetic construct; identical to SEQ ID NO: 26465
  source 1..80: mol_type = other DNA

SEQ ID NO: 211196 - DNA, 80 bp, synthetic construct; identical to SEQ ID NO: 26466
  source 1..80: mol_type = other DNA

SEQ ID NO: 211197 - DNA, 80 bp, synthetic construct; identical to SEQ ID NO: 26467
  source 1..80: mol_type = other DNA

SEQ ID NO: 211198 - DNA, 80 bp, synthetic construct; identical to SEQ ID NO: 26468
  source 1..80: mol_type = other DNA

SEQ ID NO: 211199 - DNA, 80 bp, synthetic construct; identical to SEQ ID NO: 26469
  source 1..80: mol_type = other DNA

SEQ ID NO: 211200 - DNA, 80 bp, synthetic construct; identical to SEQ ID NO: 26470
  source 1..80: mol_type = other DNA

SEQ ID NO: 211201 - DNA, 80 bp, synthetic construct; identical to SEQ ID NO: 26471
  source 1..80: mol_type = other DNA

SEQ ID NO: 211202 - DNA, 80 bp, synthetic construct; identical to SEQ ID NO: 26472
  source 1..80: mol_type = other DNA

SEQ ID NO: 211203 - DNA, 80 bp, synthetic construct; identical to SEQ ID NO: 26473
  source 1..80: mol_type = other DNA

SEQ ID NO: 211204 - DNA, 80 bp, synthetic construct; identical to SEQ ID NO: 26474
  source 1..80: mol_type = other DNA

SEQ ID NO: 211205 - DNA, 80 bp, synthetic construct; identical to SEQ ID NO: 26475
  source 1..80: mol_type = other DNA

SEQ ID NO: 211206 - DNA, 80 bp, synthetic construct; identical to SEQ ID NO: 26476
  source 1..80: mol_type = other DNA

SEQ ID NO: 211207 - DNA, 80 bp, synthetic construct; identical to SEQ ID NO: 26477
  source 1..80: mol_type = other DNA

SEQ ID NO: 211208 - DNA, 80 bp, synthetic construct; identical to SEQ ID NO: 26478
  source 1..80: mol_type = other DNA

SEQ ID NO: 211209 - DNA, 80 bp, synthetic construct; identical to SEQ ID NO: 26479
  source 1..80: mol_type = other DNA

SEQ ID NO: 211210 - DNA, 80 bp, synthetic construct; identical to SEQ ID NO: 26480
  source 1..80: mol_type = other DNA

SEQ ID NO: 211211 - DNA, 80 bp, synthetic construct; identical to SEQ ID NO: 26481
  source 1..80: mol_type = other DNA

SEQ ID NO: 211212 - DNA, 80 bp, synthetic construct; identical to SEQ ID NO: 26482
  source 1..80: mol_type = other DNA

SEQ ID NO: 211213 - DNA, 80 bp, synthetic construct; identical to SEQ ID NO: 26483
  source 1..80: mol_type = other DNA

SEQ ID NO: 211214 - DNA, 80 bp, synthetic construct; identical to SEQ ID NO: 26484
  source 1..80: mol_type = other DNA

SEQ ID NO: 211215 - DNA, 80 bp, synthetic construct; identical to SEQ ID NO: 26485
  source 1..80: mol_type = other DNA

SEQ ID NO: 211216 - DNA, 80 bp, synthetic construct; identical to SEQ ID NO: 26486
  source 1..80: mol_type = other DNA

SEQ ID NO: 211217 - DNA, 80 bp, synthetic construct; identical to SEQ ID NO: 26487
  source 1..80: mol_type = other DNA

SEQ ID NO: 211218 - DNA, 80 bp, synthetic construct; identical to SEQ ID NO: 26488
  source 1..80: mol_type = other DNA

SEQ ID NO: 211219 - DNA, 80 bp, synthetic construct; identical to SEQ ID NO: 26489
  source 1..80: mol_type = other DNA

SEQ ID NO: 211220 - DNA, 80 bp, synthetic construct; identical to SEQ ID NO: 26490
  source 1..80: mol_type = other DNA

SEQ ID NO: 211221 - DNA, 80 bp, synthetic construct; identical to SEQ ID NO: 26491
  source 1..80: mol_type = other DNA

SEQ ID NO: 211222 - DNA, 80 bp, synthetic construct; identical to SEQ ID NO: 26492
  source 1..80: mol_type = other DNA

SEQ ID NO: 211223 - DNA, 80 bp, synthetic construct; identical to SEQ ID NO: 26493
  source 1..80: mol_type = other DNA

SEQ ID NO: 211224 - DNA, 80 bp, synthetic construct; identical to SEQ ID NO: 26494
  source 1..80: mol_type = other DNA

SEQ ID NO: 211225 - DNA, 80 bp, synthetic construct; identical to SEQ ID NO: 26495
  source 1..80: mol_type = other DNA

SEQ ID NO: 211226 - DNA, 80 bp, synthetic construct; identical to SEQ ID NO: 26496
  source 1..80: mol_type = other DNA

SEQ ID NO: 211227 - DNA, 80 bp, synthetic construct; identical to SEQ ID NO: 26497
  source 1..80: mol_type = other DNA

SEQ ID NO: 211228 - DNA, 80 bp, synthetic construct; identical to SEQ ID NO: 26498
  source 1..80: mol_type = other DNA

SEQ ID NO: 211229 - DNA, 80 bp, synthetic construct; identical to SEQ ID NO: 26499
  source 1..80: mol_type = other DNA

SEQ ID NO: 211230 - DNA, 80 bp, synthetic construct; identical to SEQ ID NO: 26500
  source 1..80: mol_type = other DNA

SEQ ID NO: 211231 - DNA, 80 bp, synthetic construct; identical to SEQ ID NO: 26501
  source 1..80: mol_type = other DNA

SEQ ID NO: 211232 - DNA, 80 bp, synthetic construct; identical to SEQ ID NO: 26502
  source 1..80: mol_type = other DNA

SEQ ID NO: 211233 - DNA, 80 bp, synthetic construct; identical to SEQ ID NO: 26503
  source 1..80: mol_type = other DNA

SEQ ID NO: 211234 - DNA, 80 bp, synthetic construct; identical to SEQ ID NO: 26504
  source 1..80: mol_type = other DNA

SEQ ID NO: 211235 - DNA, 80 bp, synthetic construct; identical to SEQ ID NO: 26505
  source 1..80: mol_type = other DNA

SEQ ID NO: 211236 - DNA, 80 bp, synthetic construct; identical to SEQ ID NO: 26506
  source 1..80: mol_type = other DNA

SEQ ID NO: 211237 - DNA, 80 bp, synthetic construct; identical to SEQ ID NO: 26507
  source 1..80: mol_type = other DNA

SEQ ID NO: 211238 - DNA, 80 bp, synthetic construct; identical to SEQ ID NO: 26508
  source 1..80: mol_type = other DNA

SEQ ID NO: 211239 - DNA, 80 bp, synthetic construct; identical to SEQ ID NO: 26509
  source 1..80: mol_type = other DNA

SEQ ID NO: 211240 - DNA, 80 bp, synthetic construct; identical to SEQ ID NO: 26510
  source 1..80: mol_type = other DNA

SEQ ID NO: 211241 - DNA, 80 bp, synthetic construct; identical to SEQ ID NO: 26511
  source 1..80: mol_type = other DNA

SEQ ID NO: 211242 - DNA, 80 bp, synthetic construct; identical to SEQ ID NO: 26512
  source 1..80: mol_type = other DNA

SEQ ID NO: 211243 - DNA, 80 bp, synthetic construct; identical to SEQ ID NO: 26513
  source 1..80: mol_type = other DNA

SEQ ID NO: 211244 - DNA, 80 bp, synthetic construct; identical to SEQ ID NO: 26514
  source 1..80: mol_type = other DNA

SEQ ID NO: 211245 - DNA, 80 bp, synthetic construct; identical to SEQ ID NO: 26515
  source 1..80: mol_type = other DNA

SEQ ID NO: 211246 - DNA, 80 bp, synthetic construct; identical to SEQ ID NO: 26516
  source 1..80: mol_type = other DNA

SEQ ID NO: 211247 - DNA, 80 bp, synthetic construct; identical to SEQ ID NO: 26517
  source 1..80: mol_type = other DNA

SEQ ID NO: 211248 - DNA, 80 bp, synthetic construct; identical to SEQ ID NO: 26518
  source 1..80: mol_type = other DNA

SEQ ID NO: 211249 - DNA, 80 bp, synthetic construct; identical to SEQ ID NO: 26519
  source 1..80: mol_type = other DNA

SEQ ID NO: 211250 - DNA, 80 bp, synthetic construct; identical to SEQ ID NO: 26520
  source 1..80: mol_type = other DNA

SEQ ID NO: 211251 - DNA, 80 bp, synthetic construct; identical to SEQ ID NO: 26521
  source 1..80: mol_type = other DNA

SEQ ID NO: 211252 - DNA, 80 bp, synthetic construct; identical to SEQ ID NO: 26522
  source 1..80: mol_type = other DNA

SEQ ID NO: 211253 - DNA, 80 bp, synthetic construct; identical to SEQ ID NO: 26523
  source 1..80: mol_type = other DNA

SEQ ID NO: 211254 - DNA, 80 bp, synthetic construct; identical to SEQ ID NO: 26524
  source 1..80: mol_type = other DNA

SEQ ID NO: 211255 - DNA, 80 bp, synthetic construct; identical to SEQ ID NO: 26525
  source 1..80: mol_type = other DNA

SEQ ID NO: 211256 - DNA, 80 bp, synthetic construct; identical to SEQ ID NO: 26526
  source 1..80: mol_type = other DNA

SEQ ID NO: 211257 - DNA, 80 bp, synthetic construct; identical to SEQ ID NO: 26527
  source 1..80: mol_type = other DNA

SEQ ID NO: 211258 - DNA, 80 bp, synthetic construct; identical to SEQ ID NO: 26528
  source 1..80: mol_type = other DNA

SEQ ID NO: 211259 - DNA, 80 bp, synthetic construct; identical to SEQ ID NO: 26529
  source 1..80: mol_type = other DNA

SEQ ID NO: 211260 - DNA, 80 bp, synthetic construct; identical to SEQ ID NO: 26530
  source 1..80: mol_type = other DNA

SEQ ID NO: 211261 - DNA, 80 bp, synthetic construct; identical to SEQ ID NO: 26531
  source 1..80: mol_type = other DNA

SEQ ID NO: 211262 - DNA, 80 bp, synthetic construct; identical to SEQ ID NO: 26532
  source 1..80: mol_type = other DNA

SEQ ID NO: 211263 - DNA, 80 bp, synthetic construct; identical to SEQ ID NO: 26533
  source 1..80: mol_type = other DNA

SEQ ID NO: 211264 - DNA, 80 bp, synthetic construct; identical to SEQ ID NO: 26534
  source 1..80: mol_type = other DNA

SEQ ID NO: 211265 - DNA, 80 bp, synthetic construct; identical to SEQ ID NO: 26535
  source 1..80: mol_type = other DNA

SEQ ID NO: 211266 - DNA, 80 bp, synthetic construct; identical to SEQ ID NO: 26536
  source 1..80: mol_type = other DNA

SEQ ID NO: 211267 - DNA, 80 bp, synthetic construct; identical to SEQ ID NO: 26537
  source 1..80: mol_type = other DNA

SEQ ID NO: 211268 - DNA, 80 bp, synthetic construct; identical to SEQ ID NO: 26538
  source 1..80: mol_type = other DNA

SEQ ID NO: 211269 - DNA, 80 bp, synthetic construct; identical to SEQ ID NO: 26539
  source 1..80: mol_type = other DNA

SEQ ID NO: 211270 - DNA, 80 bp, synthetic construct; identical to SEQ ID NO: 26540
  source 1..80: mol_type = other DNA

SEQ ID NO: 211271 - DNA, 80 bp, synthetic construct; identical to SEQ ID NO: 26541
  source 1..80: mol_type = other DNA

SEQ ID NO: 211272 - DNA, 80 bp, synthetic construct; identical to SEQ ID NO: 26542
  source 1..80: mol_type = other DNA

SEQ ID NO: 211273 - DNA, 80 bp, synthetic construct; identical to SEQ ID NO: 26543
  source 1..80: mol_type = other DNA

SEQ ID NO: 211274 - DNA, 80 bp, synthetic construct; identical to SEQ ID NO: 26544
  source 1..80: mol_type = other DNA

SEQ ID NO: 211275 - DNA, 80 bp, synthetic construct; identical to SEQ ID NO: 26545
  source 1..80: mol_type = other DNA

SEQ ID NO: 211276 - DNA, 80 bp, synthetic construct; identical to SEQ ID NO: 26546
  source 1..80: mol_type = other DNA

SEQ ID NO: 211277 - DNA, 80 bp, synthetic construct; identical to SEQ ID NO: 26547
  source 1..80: mol_type = other DNA

SEQ ID NO: 211278 - DNA, 80 bp, synthetic construct; identical to SEQ ID NO: 26548
  source 1..80: mol_type = other DNA

SEQ ID NO: 211279 - DNA, 80 bp, synthetic construct; identical to SEQ ID NO: 26549
  source 1..80: mol_type = other DNA

SEQ ID NO: 211280 - DNA, 80 bp, synthetic construct; identical to SEQ ID NO: 26550
  source 1..80: mol_type = other DNA

SEQ ID NO: 211281 - DNA, 80 bp, synthetic construct; identical to SEQ ID NO: 26551
  source 1..80: mol_type = other DNA

SEQ ID NO: 211282 - DNA, 80 bp, synthetic construct; identical to SEQ ID NO: 26552
  source 1..80: mol_type = other DNA

SEQ ID NO: 211283 - DNA, 80 bp, synthetic construct; identical to SEQ ID NO: 26553
  source 1..80: mol_type = other DNA

SEQ ID NO: 211284 - DNA, 80 bp, synthetic construct; identical to SEQ ID NO: 26554
  source 1..80: mol_type = other DNA

SEQ ID NO: 211285 - DNA, 80 bp, synthetic construct; identical to SEQ ID NO: 26555
  source 1..80: mol_type = other DNA

SEQ ID NO: 211286 - DNA, 80 bp, synthetic construct; identical to SEQ ID NO: 26556
  source 1..80: mol_type = other DNA

SEQ ID NO: 211287 - DNA, 80 bp, synthetic construct; identical to SEQ ID NO: 26557
  source 1..80: mol_type = other DNA

SEQ ID NO: 211288 - DNA, 80 bp, synthetic construct; identical to SEQ ID NO: 26558
  source 1..80: mol_type = other DNA

SEQ ID NO: 211289 - DNA, 80 bp, synthetic construct; identical to SEQ ID NO: 26559
  source 1..80: mol_type = other DNA

SEQ ID NO: 211290 - DNA, 80 bp, synthetic construct; identical to SEQ ID NO: 26560
  source 1..80: mol_type = other DNA

SEQ ID NO: 211291 - DNA, 80 bp, synthetic construct; identical to SEQ ID NO: 26561
  source 1..80: mol_type = other DNA

SEQ ID NO: 211292 - DNA, 80 bp, synthetic construct; identical to SEQ ID NO: 26562
  source 1..80: mol_type = other DNA

SEQ ID NO: 211293 - DNA, 80 bp, synthetic construct; identical to SEQ ID NO: 26563
  source 1..80: mol_type = other DNA

SEQ ID NO: 211294 - DNA, 80 bp, synthetic construct; identical to SEQ ID NO: 26564
  source 1..80: mol_type = other DNA

SEQ ID NO: 211295 - DNA, 80 bp, synthetic construct; identical to SEQ ID NO: 26565
  source 1..80: mol_type = other DNA

SEQ ID NO: 211296 - DNA, 80 bp, synthetic construct; identical to SEQ ID NO: 26566
  source 1..80: mol_type = other DNA

SEQ ID NO: 211297 - DNA, 80 bp, synthetic construct; identical to SEQ ID NO: 26567
  source 1..80: mol_type = other DNA

SEQ ID NO: 211298 - DNA, 80 bp, synthetic construct; identical to SEQ ID NO: 26568
  source 1..80: mol_type = other DNA

SEQ ID NO: 211299 - DNA, 80 bp, synthetic construct; identical to SEQ ID NO: 26569
  source 1..80: mol_type = other DNA

SEQ ID NO: 211300 - DNA, 80 bp, synthetic construct; identical to SEQ ID NO: 26570
  source 1..80: mol_type = other DNA

SEQ ID NO: 211301 - DNA, 80 bp, synthetic construct; identical to SEQ ID NO: 26571
  source 1..80: mol_type = other DNA

SEQ ID NO: 211302 - DNA, 80 bp, synthetic construct; identical to SEQ ID NO: 26572
  source 1..80: mol_type = other DNA

SEQ ID NO: 211303 - DNA, 80 bp, synthetic construct; identical to SEQ ID NO: 26573
  source 1..80: mol_type = other DNA

SEQ ID NO: 211304 - DNA, 80 bp, synthetic construct; identical to SEQ ID NO: 26574
  source 1..80: mol_type = other DNA

SEQ ID NO: 211305 - DNA, 80 bp, synthetic construct; identical to SEQ ID NO: 26575
  source 1..80: mol_type = other DNA

SEQ ID NO: 211306 - DNA, 80 bp, synthetic construct; identical to SEQ ID NO: 26576
  source 1..80: mol_type = other DNA

SEQ ID NO: 211307 - DNA, 80 bp, synthetic construct; identical to SEQ ID NO: 26577
  source 1..80: mol_type = other DNA

SEQ ID NO: 211308 - DNA, 80 bp, synthetic construct; identical to SEQ ID NO: 26578
  source 1..80: mol_type = other DNA

SEQ ID NO: 211309 - DNA, 80 bp, synthetic construct; identical to SEQ ID NO: 26579
  source 1..80: mol_type = other DNA

SEQ ID NO: 211310 - DNA, 80 bp, synthetic construct; identical to SEQ ID NO: 26580
  source 1..80: mol_type = other DNA

SEQ ID NO: 211311 - DNA, 80 bp, synthetic construct; identical to SEQ ID NO: 26581
  source 1..80: mol_type = other DNA

SEQ ID NO: 211312 - DNA, 80 bp, synthetic construct; identical to SEQ ID NO: 26582
  source 1..80: mol_type = other DNA

SEQ ID NO: 211313 - DNA, 80 bp, synthetic construct; identical to SEQ ID NO: 26583
  source 1..80: mol_type = other DNA

SEQ ID NO: 211314 - DNA, 80 bp, synthetic construct; identical to SEQ ID NO: 26584
  source 1..80: mol_type = other DNA

SEQ ID NO: 211315 - DNA, 80 bp, synthetic construct; identical to SEQ ID NO: 26585
  source 1..80: mol_type = other DNA

SEQ ID NO: 211316 - DNA, 80 bp, synthetic construct; identical to SEQ ID NO: 26586
  source 1..80: mol_type = other DNA

SEQ ID NO: 211317 - DNA, 80 bp, synthetic construct; identical to SEQ ID NO: 26587
  source 1..80: mol_type = other DNA

SEQ ID NO: 211318 - DNA, 80 bp, synthetic construct; identical to SEQ ID NO: 26588
  source 1..80: mol_type = other DNA

SEQ ID NO: 211319 - DNA, 80 bp, synthetic construct; identical to SEQ ID NO: 26589
  source 1..80: mol_type = other DNA

SEQ ID NO: 211320 - DNA, 80 bp, synthetic construct; identical to SEQ ID NO: 26590
  source 1..80: mol_type = other DNA

SEQ ID NO: 211321 - DNA, 80 bp, synthetic construct; identical to SEQ ID NO: 26591
  source 1..80: mol_type = other DNA

SEQ ID NO: 211322 - DNA, 80 bp, synthetic construct; identical to SEQ ID NO: 26592
  source 1..80: mol_type = other DNA

SEQ ID NO: 211323 - DNA, 80 bp, synthetic construct; identical to SEQ ID NO: 26593
  source 1..80: mol_type = other DNA

SEQ ID NO: 211324 - DNA, 80 bp, synthetic construct; identical to SEQ ID NO: 26594
  source 1..80: mol_type = other DNA

SEQ ID NO: 211325 - DNA, 80 bp, synthetic construct; identical to SEQ ID NO: 26595
  source 1..80: mol_type = other DNA

SEQ ID NO: 211326 - DNA, 80 bp, synthetic construct; identical to SEQ ID NO: 26596
  source 1..80: mol_type = other DNA

SEQ ID NO: 211327 - DNA, 80 bp, synthetic construct; identical to SEQ ID NO: 26597
  source 1..80: mol_type = other DNA

SEQ ID NO: 211328 - DNA, 80 bp, synthetic construct; identical to SEQ ID NO: 26598
  source 1..80: mol_type = other DNA

SEQ ID NO: 211329 - DNA, 80 bp, synthetic construct; identical to SEQ ID NO: 26599
  source 1..80: mol_type = other DNA

SEQ ID NO: 211330 - DNA, 80 bp, synthetic construct; identical to SEQ ID NO: 26600
  source 1..80: mol_type = other DNA

SEQ ID NO: 211331 - DNA, 80 bp, synthetic construct; identical to SEQ ID NO: 26601
  source 1..80: mol_type = other DNA

SEQ ID NO: 211332 - DNA, 80 bp, synthetic construct; identical to SEQ ID NO: 26602
  source 1..80: mol_type = other DNA

SEQ ID NO: 211333 - DNA, 80 bp, synthetic construct; identical to SEQ ID NO: 26603
  source 1..80: mol_type = other DNA

SEQ ID NO: 211334 - DNA, 80 bp, synthetic construct; identical to SEQ ID NO: 26604
  source 1..80: mol_type = other DNA

SEQ ID NO: 211335 - DNA, 80 bp, synthetic construct; identical to SEQ ID NO: 26605
  source 1..80: mol_type = other DNA

SEQ ID NO: 211336 - DNA, 80 bp, synthetic construct; identical to SEQ ID NO: 26606
  source 1..80: mol_type = other DNA

SEQ ID NO: 211337 - DNA, 80 bp, synthetic construct; identical to SEQ ID NO: 26607
  source 1..80: mol_type = other DNA

SEQ ID NO: 211338 - DNA, 80 bp, synthetic construct; identical to SEQ ID NO: 26608
  source 1..80: mol_type = other DNA

SEQ ID NO: 211339 - DNA, 80 bp, synthetic construct; identical to SEQ ID NO: 26609
  source 1..80: mol_type = other DNA

SEQ ID NO: 211340 - DNA, 80 bp, synthetic construct; identical to SEQ ID NO: 26610
  source 1..80: mol_type = other DNA

SEQ ID NO: 211341 - DNA, 80 bp, synthetic construct; identical to SEQ ID NO: 26611
  source 1..80: mol_type = other DNA

SEQ ID NO: 211342 - DNA, 80 bp, synthetic construct; identical to SEQ ID NO: 26612
  source 1..80: mol_type = other DNA

SEQ ID NO: 211343 - DNA, 80 bp, synthetic construct; identical to SEQ ID NO: 26613
  source 1..80: mol_type = other DNA

SEQ ID NO: 211344 - DNA, 80 bp, synthetic construct; identical to SEQ ID NO: 26614
  source 1..80: mol_type = other DNA

SEQ ID NO: 211345 - DNA, 80 bp, synthetic construct; identical to SEQ ID NO: 26615
  source 1..80: mol_type = other DNA

SEQ ID NO: 211346 - DNA, 80 bp, synthetic construct; identical to SEQ ID NO: 26616
  source 1..80: mol_type = other DNA

SEQ ID NO: 211347 - DNA, 80 bp, synthetic construct; identical to SEQ ID NO: 26617
  source 1..80: mol_type = other DNA

SEQ ID NO: 211348 - DNA, 80 bp, synthetic construct; identical to SEQ ID NO: 26618
  source 1..80: mol_type = other DNA

SEQ ID NO: 211349 - DNA, 80 bp, synthetic construct; identical to SEQ ID NO: 26619
  source 1..80: mol_type = other DNA

SEQ ID NO: 211350 - DNA, 80 bp, synthetic construct; identical to SEQ ID NO: 26620
  source 1..80: mol_type = other DNA

SEQ ID NO: 211351 - DNA, 80 bp, synthetic construct; identical to SEQ ID NO: 26621
  source 1..80: mol_type = other DNA

SEQ ID NO: 211352 - DNA, 80 bp, synthetic construct; identical to SEQ ID NO: 26622
  source 1..80: mol_type = other DNA

SEQ ID NO: 211353 - DNA, 80 bp, synthetic construct; identical to SEQ ID NO: 26623
  source 1..80: mol_type = other DNA

SEQ ID NO: 211354 - DNA, 80 bp, synthetic construct; identical to SEQ ID NO: 26624
  source 1..80: mol_type = other DNA

SEQ ID NO: 211355 - DNA, 80 bp, synthetic construct; identical to SEQ ID NO: 26625
  source 1..80: mol_type = other DNA

SEQ ID NO: 211356 - DNA, 80 bp, synthetic construct; identical to SEQ ID NO: 26626
  source 1..80: mol_type = other DNA

SEQ ID NO: 211357 - DNA, 80 bp, synthetic construct; identical to SEQ ID NO: 26627
  source 1..80: mol_type = other DNA

SEQ ID NO: 211358 - DNA, 80 bp, synthetic construct; identical to SEQ ID NO: 26628
  source 1..80: mol_type = other DNA

SEQ ID NO: 211359 - DNA, 80 bp, synthetic construct; identical to SEQ ID NO: 26629
  source 1..80: mol_type = other DNA

SEQ ID NO: 211360 - DNA, 80 bp, synthetic construct; identical to SEQ ID NO: 26630
  source 1..80: mol_type = other DNA

SEQ ID NO: 211361 - DNA, 80 bp, synthetic construct; identical to SEQ ID NO: 26631
  source 1..80: mol_type = other DNA

SEQ ID NO: 211362 - DNA, 80 bp, synthetic construct; identical to SEQ ID NO: 26632
  source 1..80: mol_type = other DNA

SEQ ID NO: 211363 - DNA, 80 bp, synthetic construct; identical to SEQ ID NO: 26633
  source 1..80: mol_type = other DNA

SEQ ID NO: 211364 - DNA, 80 bp, synthetic construct; identical to SEQ ID NO: 26634
  source 1..80: mol_type = other DNA

SEQ ID NO: 211365 - DNA, 80 bp, synthetic construct; identical to SEQ ID NO: 26635
  source 1..80: mol_type = other DNA

SEQ ID NO: 211366 - DNA, 80 bp, synthetic construct; identical to SEQ ID NO: 26636
  source 1..80: mol_type = other DNA

SEQ ID NO: 211367 - DNA, 80 bp, synthetic construct; identical to SEQ ID NO: 26637
  source 1..80: mol_type = other DNA

SEQ ID NO: 211368 - DNA, 80 bp, synthetic construct; identical to SEQ ID NO: 26638
  source 1..80: mol_type = other DNA

SEQ ID NO: 211369 - DNA, 80 bp, synthetic construct; identical to SEQ ID NO: 26639
  source 1..80: mol_type = other DNA

SEQ ID NO: 211370 - DNA, 80 bp, synthetic construct; identical to SEQ ID NO: 26640
  source 1..80: mol_type = other DNA

SEQ ID NO: 211371 - DNA, 80 bp, synthetic construct; identical to SEQ ID NO: 26641
  source 1..80: mol_type = other DNA

SEQ ID NO: 211372 - DNA, 80 bp, synthetic construct; identical to SEQ ID NO: 26642
  source 1..80: mol_type = other DNA

SEQ ID NO: 211373 - DNA, 80 bp, synthetic construct; identical to SEQ ID NO: 26643
  source 1..80: mol_type = other DNA

SEQ ID NO: 211374 - DNA, 80 bp, synthetic construct; identical to SEQ ID NO: 26644
  source 1..80: mol_type = other DNA

SEQ ID NO: 211375 - DNA, 80 bp, synthetic construct; identical to SEQ ID NO: 26645
  source 1..80: mol_type = other DNA

SEQ ID NO: 211376 - DNA, 80 bp, synthetic construct; identical to SEQ ID NO: 26646
  source 1..80: mol_type = other DNA

SEQ ID NO: 211377 - DNA, 80 bp, synthetic construct; identical to SEQ ID NO: 26647
  source 1..80: mol_type = other DNA

SEQ ID NO: 211378 - DNA, 80 bp, synthetic construct; identical to SEQ ID NO: 26648
  source 1..80: mol_type = other DNA

SEQ ID NO: 211379 - DNA, 80 bp, synthetic construct; identical to SEQ ID NO: 26649
  source 1..80: mol_type = other DNA

SEQ ID NO: 211380 - DNA, 80 bp, synthetic construct; identical to SEQ ID NO: 26650
  source 1..80: mol_type = other DNA

SEQ ID NO: 211381 - DNA, 80 bp, synthetic construct; identical to SEQ ID NO: 26651
  source 1..80: mol_type = other DNA

SEQ ID NO: 211382 - DNA, 80 bp, synthetic construct; identical to SEQ ID NO: 26652
  source 1..80: mol_type = other DNA

SEQ ID NO: 211383 - DNA, 80 bp, synthetic construct; identical to SEQ ID NO: 26653
  source 1..80: mol_type = other DNA

SEQ ID NO: 211384 - DNA, 80 bp, synthetic construct; identical to SEQ ID NO: 26654
  source 1..80: mol_type = other DNA

SEQ ID NO: 211385 - DNA, 80 bp, synthetic construct; identical to SEQ ID NO: 26655
  source 1..80: mol_type = other DNA

SEQ ID NO: 211386 - DNA, 80 bp, synthetic construct; identical to SEQ ID NO: 26656
  source 1..80: mol_type = other DNA

SEQ ID NO: 211387 - DNA, 80 bp, synthetic construct; identical to SEQ ID NO: 26657
  source 1..80: mol_type = other DNA

SEQ ID NO: 211388 - DNA, 80 bp, synthetic construct; identical to SEQ ID NO: 26658
  source 1..80: mol_type = other DNA

SEQ ID NO: 211389 - DNA, 80 bp, synthetic construct; identical to SEQ ID NO: 26659
  source 1..80: mol_type = other DNA

SEQ ID NO: 211390 - DNA, 80 bp, synthetic construct; identical to SEQ ID NO: 26660
  source 1..80: mol_type = other DNA

SEQ ID NO: 211391 - DNA, 80 bp, synthetic construct; identical to SEQ ID NO: 26661
  source 1..80: mol_type = other DNA

SEQ ID NO: 211392 - DNA, 80 bp, synthetic construct; identical to SEQ ID NO: 26662
  source 1..80: mol_type = other DNA

SEQ ID NO: 211393 - DNA, 80 bp, synthetic construct; identical to SEQ ID NO: 26663
  source 1..80: mol_type = other DNA

SEQ ID NO: 211394 - DNA, 80 bp, synthetic construct; identical to SEQ ID NO: 26664
  source 1..80: mol_type = other DNA

SEQ ID NO: 211395 - DNA, 80 bp, synthetic construct; identical to SEQ ID NO: 26665
  source 1..80: mol_type = other DNA

SEQ ID NO: 211396 - DNA, 80 bp, synthetic construct; identical to SEQ ID NO: 26666
  source 1..80: mol_type = other DNA

SEQ ID NO: 211397 - DNA, 80 bp, synthetic construct; identical to SEQ ID NO: 26667
  source 1..80: mol_type = other DNA

SEQ ID NO: 211398 - DNA, 80 bp, synthetic construct; identical to SEQ ID NO: 26668
  source 1..80: mol_type = other DNA

SEQ ID NO: 211399 - DNA, 80 bp, synthetic construct; identical to SEQ ID NO: 26669
  source 1..80: mol_type = other DNA

SEQ ID NO: 211400 - DNA, 80 bp, synthetic construct; identical to SEQ ID NO: 26670
  source 1..80: mol_type = other DNA

SEQ ID NO: 211401 - DNA, 80 bp, synthetic construct; identical to SEQ ID NO: 26671
  source 1..80: mol_type = other DNA

SEQ ID NO: 211402 - DNA, 80 bp, synthetic construct; identical to SEQ ID NO: 26672
  source 1..80: mol_type = other DNA

SEQ ID NO: 211403 - DNA, 80 bp, synthetic construct; identical to SEQ ID NO: 26673
  source 1..80: mol_type = other DNA

SEQ ID NO: 211404 - DNA, 80 bp, synthetic construct; identical to SEQ ID NO: 26674
  source 1..80: mol_type = other DNA

SEQ ID NO: 211405 - DNA, 80 bp, synthetic construct; identical to SEQ ID NO: 26675
  source 1..80: mol_type = other DNA

SEQ ID NO: 211406 - DNA, 80 bp, synthetic construct; identical to SEQ ID NO: 26676
  source 1..80: mol_type = other DNA

SEQ ID NO: 211407 - DNA, 80 bp, synthetic construct; identical to SEQ ID NO: 26677
  source 1..80: mol_type = other DNA

SEQ ID NO: 211408 - DNA, 80 bp, synthetic construct; identical to SEQ ID NO: 26678
  source 1..80: mol_type = other DNA

SEQ ID NO: 211409 - DNA, 80 bp, synthetic construct; identical to SEQ ID NO: 26679
  source 1..80: mol_type = other DNA

SEQ ID NO: 211410 - DNA, 80 bp, synthetic construct; identical to SEQ ID NO: 26680
  source 1..80: mol_type = other DNA

SEQ ID NO: 211411 - DNA, 80 bp, synthetic construct; identical to SEQ ID NO: 26681
  source 1..80: mol_type = other DNA

SEQ ID NO: 211412 - DNA, 80 bp, synthetic construct; identical to SEQ ID NO: 26682
  source 1..80: mol_type = other DNA

SEQ ID NO: 211413 - DNA, 80 bp, synthetic construct; identical to SEQ ID NO: 26683
  source 1..80: mol_type = other DNA

SEQ ID NO: 211414 - DNA, 80 bp, synthetic construct; identical to SEQ ID NO: 26684
  source 1..80: mol_type = other DNA

SEQ ID NO: 211415 - DNA, 80 bp, synthetic construct; identical to SEQ ID NO: 26685
  source 1..80: mol_type = other DNA

SEQ ID NO: 211416 - DNA, 80 bp, synthetic construct; identical to SEQ ID NO: 26686
  source 1..80: mol_type = other DNA

SEQ ID NO: 211417 - DNA, 80 bp, synthetic construct; identical to SEQ ID NO: 26687
  source 1..80: mol_type = other DNA

SEQ ID NO: 211418 - DNA, 80 bp, synthetic construct; identical to SEQ ID NO: 26688
  source 1..80: mol_type = other DNA

SEQ ID NO: 211419 - DNA, 80 bp, synthetic construct; identical to SEQ ID NO: 26689
  source 1..80: mol_type = other DNA

SEQ ID NO: 211420 - DNA, 80 bp, synthetic construct; identical to SEQ ID NO: 26690
  source 1..80: mol_type = other DNA

SEQ ID NO: 211421 - DNA, 80 bp, synthetic construct; identical to SEQ ID NO: 26691
  source 1..80: mol_type = other DNA

SEQ ID NO: 211422 - DNA, 80 bp, synthetic construct; identical to SEQ ID NO: 26692
  source 1..80: mol_type = other DNA

SEQ ID NO: 211423 - DNA, 80 bp, synthetic construct; identical to SEQ ID NO: 26693
  source 1..80: mol_type = other DNA

SEQ ID NO: 211424 - DNA, 80 bp, synthetic construct; identical to SEQ ID NO: 26694
  source 1..80: mol_type = other DNA

SEQ ID NO: 211425 - DNA, 80 bp, synthetic construct; identical to SEQ ID NO: 26695
  source 1..80: mol_type = other DNA

SEQ ID NO: 211426 - DNA, 80 bp, synthetic construct; identical to SEQ ID NO: 26696
  source 1..80: mol_type = other DNA

SEQ ID NO: 211427 - DNA, 80 bp, synthetic construct; identical to SEQ ID NO: 26697
  source 1..80: mol_type = other DNA

SEQ ID NO: 211428 - DNA, 80 bp, synthetic construct; identical to SEQ ID NO: 26698
  source 1..80: mol_type = other DNA

SEQ ID NO: 211429 - DNA, 80 bp, synthetic construct; identical to SEQ ID NO: 26699
  source 1..80: mol_type = other DNA

SEQ ID NO: 211430 - DNA, 80 bp, synthetic construct; identical to SEQ ID NO: 26700
  source 1..80: mol_type = other DNA

SEQ ID NO: 211431 - DNA, 80 bp, synthetic construct; identical to SEQ ID NO: 26701
  source 1..80: mol_type = other DNA

SEQ ID NO: 211432 - DNA, 80 bp, synthetic construct; identical to SEQ ID NO: 26702
  source 1..80: mol_type = other DNA

SEQ ID NO: 211433 - DNA, 80 bp, synthetic construct; identical to SEQ ID NO: 26703
  source 1..80: mol_type = other DNA

SEQ ID NO: 211434 - DNA, 80 bp, synthetic construct; identical to SEQ ID NO: 26704
  source 1..80: mol_type = other DNA

SEQ ID NO: 211435 - DNA, 80 bp, synthetic construct; identical to SEQ ID NO: 26705
  source 1..80: mol_type = other DNA

SEQ ID NO: 211436 - DNA, 80 bp, synthetic construct; identical to SEQ ID NO: 26706
  source 1..80: mol_type = other DNA

SEQ ID NO: 211437 - DNA, 80 bp, synthetic construct; identical to SEQ ID NO: 26707
  source 1..80: mol_type = other DNA

SEQ ID NO: 211438 - DNA, 80 bp, synthetic construct; identical to SEQ ID NO: 26708
  source 1..80: mol_type = other DNA

SEQ ID NO: 211439 - DNA, 80 bp, synthetic construct; identical to SEQ ID NO: 26709
  source 1..80: mol_type = other DNA

SEQ ID NO: 211440 - DNA, 80 bp, synthetic construct; identical to SEQ ID NO: 26710
  source 1..80: mol_type = other DNA

SEQ ID NO: 211441 - DNA, 80 bp, synthetic construct; identical to SEQ ID NO: 26711
  source 1..80: mol_type = other DNA

SEQ ID NO: 211442 - DNA, 80 bp, synthetic construct; identical to SEQ ID NO: 26712
  source 1..80: mol_type = other DNA

SEQ ID NO: 211443 - DNA, 80 bp, synthetic construct; identical to SEQ ID NO: 26713
  source 1..80: mol_type = other DNA

SEQ ID NO: 211444 - DNA, 80 bp, synthetic construct; identical to SEQ ID NO: 26714
  source 1..80: mol_type = other DNA

SEQ ID NO: 211445 - DNA, 80 bp, synthetic construct; identical to SEQ ID NO: 26715
  source 1..80: mol_type = other DNA

SEQ ID NO: 211446 - DNA, 80 bp, synthetic construct; identical to SEQ ID NO: 26716
  source 1..80: mol_type = other DNA

SEQ ID NO: 211447 - DNA, 80 bp, synthetic construct; identical to SEQ ID NO: 26717
  source 1..80: mol_type = other DNA

SEQ ID NO: 211448 - DNA, 80 bp, synthetic construct; identical to SEQ ID NO: 26718
  source 1..80: mol_type = other DNA

SEQ ID NO: 211449 - DNA, 80 bp, synthetic construct; identical to SEQ ID NO: 26719
  source 1..80: mol_type = other DNA

SEQ ID NO: 211450 - DNA, 80 bp, synthetic construct; identical to SEQ ID NO: 26720
  source 1..80: mol_type = other DNA

SEQ ID NO: 211451 - DNA, 80 bp, synthetic construct; identical to SEQ ID NO: 26721
  source 1..80: mol_type = other DNA

SEQ ID NO: 211452 - DNA, 80 bp, synthetic construct; identical to SEQ ID NO: 26722
  source 1..80: mol_type = other DNA

SEQ ID NO: 211453 - DNA, 80 bp, synthetic construct; identical to SEQ ID NO: 26723
  source 1..80: mol_type = other DNA

SEQ ID NO: 211454 - DNA, 80 bp, synthetic construct; identical to SEQ ID NO: 26724
  source 1..80: mol_type = other DNA

SEQ ID NO: 211455 - DNA, 80 bp, synthetic construct; identical to SEQ ID NO: 26725
  source 1..80: mol_type = other DNA

SEQ ID NO: 211456 - DNA, 80 bp, synthetic construct; identical to SEQ ID NO: 26726
  source 1..80: mol_type = other DNA

SEQ ID NO: 211457 - DNA, 80 bp, synthetic construct; identical to SEQ ID NO: 26727
  source 1..80: mol_type = other DNA

SEQ ID NO: 211458 - DNA, 80 bp, synthetic construct; identical to SEQ ID NO: 26728
  source 1..80: mol_type = other DNA

SEQ ID NO: 211459 - DNA, 80 bp, synthetic construct; identical to SEQ ID NO: 26729
  source 1..80: mol_type = other DNA

SEQ ID NO: 211460 - DNA, 80 bp, synthetic construct; identical to SEQ ID NO: 26730
  source 1..80: mol_type = other DNA

SEQ ID NO: 211461 - DNA, 80 bp, synthetic construct; identical to SEQ ID NO: 26731
  source 1..80: mol_type = other DNA

SEQ ID NO: 211462 - DNA, 80 bp, synthetic construct; identical to SEQ ID NO: 26732
  source 1..80: mol_type = other DNA

SEQ ID NO: 211463 - DNA, 80 bp, synthetic construct; identical to SEQ ID NO: 26733
  source 1..80: mol_type = other DNA

SEQ ID NO: 211464 - DNA, 80 bp, synthetic construct; identical to SEQ ID NO: 26734
  source 1..80: mol_type = other DNA

SEQ ID NO: 211465 - DNA, 80 bp, synthetic construct; identical to SEQ ID NO: 26735
  source 1..80: mol_type = other DNA

SEQ ID NO: 211466 - DNA, 80 bp, synthetic construct; identical to SEQ ID NO: 26736
  source 1..80: mol_type = other DNA

SEQ ID NO: 211467 - DNA, 80 bp, synthetic construct; identical to SEQ ID NO: 26737
  source 1..80: mol_type = other DNA

SEQ ID NO: 211468 - DNA, 80 bp, synthetic construct; identical to SEQ ID NO: 26738
  source 1..80: mol_type = other DNA

SEQ ID NO: 211469 - DNA, 80 bp, synthetic construct; identical to SEQ ID NO: 26739
  source 1..80: mol_type = other DNA

SEQ ID NO: 211470 - DNA, 80 bp, synthetic construct; identical to SEQ ID NO: 26740
  source 1..80: mol_type = other DNA

SEQ ID NO: 211471 - DNA, 80 bp, synthetic construct; identical to SEQ ID NO: 26741
  source 1..80: mol_type = other DNA

SEQ ID NO: 211472 - DNA, 80 bp, synthetic construct; identical to SEQ ID NO: 26742
  source 1..80: mol_type = other DNA

SEQ ID NO: 211473 - DNA, 80 bp, synthetic construct; identical to SEQ ID NO: 26743
  source 1..80: mol_type = other DNA

SEQ ID NO: 211474 - DNA, 80 bp, synthetic construct; identical to SEQ ID NO: 26744
  source 1..80: mol_type = other DNA

SEQ ID NO: 211475 - DNA, 80 bp, synthetic construct; identical to SEQ ID NO: 26745
  source 1..80: mol_type = other DNA

SEQ ID NO: 211476 - DNA, 80 bp, synthetic construct; identical to SEQ ID NO: 26746
  source 1..80: mol_type = other DNA

SEQ ID NO: 211477 - DNA, 80 bp, synthetic construct; identical to SEQ ID NO: 26747
  source 1..80: mol_type = other DNA

SEQ ID NO: 211478 - DNA, 80 bp, synthetic construct; identical to SEQ ID NO: 26748
  source 1..80: mol_type = other DNA

SEQ ID NO: 211479 - DNA, 80 bp, synthetic construct; identical to SEQ ID NO: 26749
  source 1..80: mol_type = other DNA

SEQ ID NO: 211480 - DNA, 80 bp, synthetic construct; identical to SEQ ID NO: 26750
  source 1..80: mol_type = other DNA

SEQ ID NO: 211481 - DNA, 80 bp, synthetic construct; identical to SEQ ID NO: 26751
  source 1..80: mol_type = other DNA

SEQ ID NO: 211482 - DNA, 80 bp, synthetic construct; identical to SEQ ID NO: 26752
  source 1..80: mol_type = other DNA

SEQ ID NO: 211483 - DNA, 80 bp, synthetic construct; identical to SEQ ID NO: 26753
  source 1..80: mol_type = other DNA

SEQ ID NO: 211484 - DNA, 80 bp, synthetic construct; identical to SEQ ID NO: 26754
  source 1..80: mol_type = other DNA

SEQ ID NO: 211485 - DNA, 80 bp, synthetic construct; identical to SEQ ID NO: 26755
  source 1..80: mol_type = other DNA

SEQ ID NO: 211486 - DNA, 80 bp, synthetic construct; identical to SEQ ID NO: 26756
  source 1..80: mol_type = other DNA

SEQ ID NO: 211487 - DNA, 80 bp, synthetic construct; identical to SEQ ID NO: 26757
  source 1..80: mol_type = other DNA

SEQ ID NO: 211488 - DNA, 80 bp, synthetic construct; identical to SEQ ID NO: 26758
  source 1..80: mol_type = other DNA

SEQ ID NO: 211489 - DNA, 80 bp, synthetic construct; identical to SEQ ID NO: 26759
  source 1..80: mol_type = other DNA

SEQ ID NO: 211490 - DNA, 80 bp, synthetic construct; identical to SEQ ID NO: 26760
  source 1..80: mol_type = other DNA

SEQ ID NO: 211491 - DNA, 80 bp, synthetic construct; identical to SEQ ID NO: 26761
  source 1..80: mol_type = other DNA

SEQ ID NO: 211492 - DNA, 80 bp, synthetic construct; identical to SEQ ID NO: 26762
  source 1..80: mol_type = other DNA

SEQ ID NO: 211493 - DNA, 80 bp, synthetic construct; identical to SEQ ID NO: 26763
  source 1..80: mol_type = other DNA

SEQ ID NO: 211494 - DNA, 80 bp, synthetic construct; identical to SEQ ID NO: 26764
  source 1..80: mol_type = other DNA

SEQ ID NO: 211495 - DNA, 80 bp, synthetic construct; identical to SEQ ID NO: 26765
  source 1..80: mol_type = other DNA

SEQ ID NO: 211496 - DNA, 80 bp, synthetic construct; identical to SEQ ID NO: 26766
  source 1..80: mol_type = other DNA

SEQ ID NO: 211497 - DNA, 80 bp, synthetic construct; identical to SEQ ID NO: 26767
  source 1..80: mol_type = other DNA

SEQ ID NO: 211498 - DNA, 80 bp, synthetic construct; identical to SEQ ID NO: 26768
  source 1..80: mol_type = other DNA

SEQ ID NO: 211499 - DNA, 80 bp, synthetic construct; identical to SEQ ID NO: 26769
  source 1..80: mol_type = other DNA

SEQ ID NO: 211500 - DNA, 80 bp, synthetic construct; identical to SEQ ID NO: 26770
  source 1..80: mol_type = other DNA

SEQ ID NO: 211501 - DNA, 80 bp, synthetic construct; identical to SEQ ID NO: 26771
  source 1..80: mol_type = other DNA

SEQ ID NO: 211502 - DNA, 80 bp, synthetic construct; identical to SEQ ID NO: 26772
  source 1..80: mol_type = other DNA

SEQ ID NO: 211503 - DNA, 80 bp, synthetic construct; identical to SEQ ID NO: 26773
  source 1..80: mol_type = other DNA

SEQ ID NO: 211504 - DNA, 80 bp, synthetic construct; identical to SEQ ID NO: 26774
  source 1..80: mol_type = other DNA

SEQ ID NO: 211505 - DNA, 80 bp, synthetic construct; identical to SEQ ID NO: 26775
  source 1..80: mol_type = other DNA

SEQ ID NO: 211506 - DNA, 80 bp, synthetic construct; identical to SEQ ID NO: 26776
  source 1..80: mol_type = other DNA

SEQ ID NO: 211507 - DNA, 80 bp, synthetic construct; identical to SEQ ID NO: 26777
  source 1..80: mol_type = other DNA

SEQ ID NO: 211508 - DNA, 80 bp, synthetic construct; identical to SEQ ID NO: 26778
  source 1..80: mol_type = other DNA

SEQ ID NO: 211509 - DNA, 80 bp, synthetic construct; identical to SEQ ID NO: 26779
  source 1..80: mol_type = other DNA

SEQ ID NO: 211510 - DNA, 80 bp, synthetic construct; identical to SEQ ID NO: 26780
  source 1..80: mol_type = other DNA

SEQ ID NO: 211511 - DNA, 80 bp, synthetic construct; identical to SEQ ID NO: 26781
  source 1..80: mol_type = other DNA

SEQ ID NO: 211512 - DNA, 80 bp, synthetic construct; identical to SEQ ID NO: 26782
  source 1..80: mol_type = other DNA

SEQ ID NO: 211513 - DNA, 80 bp, synthetic construct; identical to SEQ ID NO: 26783
  source 1..80: mol_type = other DNA

SEQ ID NO: 211514 - DNA, 80 bp, synthetic construct; identical to SEQ ID NO: 26784
  source 1..80: mol_type = other DNA

SEQ ID NO: 211515 - DNA, 80 bp, synthetic construct; identical to SEQ ID NO: 26785
  source 1..80: mol_type = other DNA

SEQ ID NO: 211516 - DNA, 80 bp, synthetic construct; identical to SEQ ID NO: 26786
  source 1..80: mol_type = other DNA

SEQ ID NO: 211517 - DNA, 80 bp, synthetic construct; identical to SEQ ID NO: 26787
  source 1..80: mol_type = other DNA

SEQ ID NO: 211518 - DNA, 80 bp, synthetic construct; identical to SEQ ID NO: 26788
  source 1..80: mol_type = other DNA

SEQ ID NO: 211519 - DNA, 80 bp, synthetic construct; identical to SEQ ID NO: 26789
  source 1..80: mol_type = other DNA

SEQ ID NO: 211520 - DNA, 80 bp, synthetic construct; identical to SEQ ID NO: 26790
  source 1..80: mol_type = other DNA

SEQ ID NO: 211521 - DNA, 80 bp, synthetic construct; identical to SEQ ID NO: 26791
  source 1..80: mol_type = other DNA

SEQ ID NO: 211522 - DNA, 80 bp, synthetic construct; identical to SEQ ID NO: 26792
  source 1..80: mol_type = other DNA

SEQ ID NO: 211523 - DNA, 80 bp, synthetic construct; identical to SEQ ID NO: 26793
  source 1..80: mol_type = other DNA

SEQ ID NO: 211524 - DNA, 80 bp, synthetic construct; identical to SEQ ID NO: 26794
  source 1..80: mol_type = other DNA

SEQ ID NO: 211525 - DNA, 80 bp, synthetic construct; identical to SEQ ID NO: 26795
  source 1..80: mol_type = other DNA

SEQ ID NO: 211526 - DNA, 80 bp, synthetic construct; identical to SEQ ID NO: 26796
  source 1..80: mol_type = other DNA

SEQ ID NO: 211527 - DNA, 80 bp, synthetic construct; identical to SEQ ID NO: 26797
  source 1..80: mol_type = other DNA

SEQ ID NO: 211528 - DNA, 80 bp, synthetic construct; identical to SEQ ID NO: 26798
  source 1..80: mol_type = other DNA

SEQ ID NO: 211529 - DNA, 80 bp, synthetic construct; identical to SEQ ID NO: 26799
  source 1..80: mol_type = other DNA

SEQ ID NO: 211530 - DNA, 80 bp, synthetic construct; identical to SEQ ID NO: 26800
  source 1..80: mol_type = other DNA

SEQ ID NO: 211531 - DNA, 80 bp, synthetic construct; identical to SEQ ID NO: 26801
  source 1..80: mol_type = other DNA

SEQ ID NO: 211532 - DNA, 80 bp, synthetic construct; identical to SEQ ID NO: 26802
  source 1..80: mol_type = other DNA

SEQ ID NO: 211533 - DNA, 80 bp, synthetic construct; identical to SEQ ID NO: 26803
  source 1..80: mol_type = other DNA

SEQ ID NO: 211534 - DNA, 80 bp, synthetic construct; identical to SEQ ID NO: 26804
  source 1..80: mol_type = other DNA

SEQ ID NO: 211535 - DNA, 80 bp, synthetic construct; identical to SEQ ID NO: 26805
  source 1..80: mol_type = other DNA

SEQ ID NO: 211536 - DNA, 80 bp, synthetic construct; identical to SEQ ID NO: 26806
  source 1..80: mol_type = other DNA

SEQ ID NO: 211537 - DNA, 80 bp, synthetic construct; identical to SEQ ID NO: 26807
  source 1..80: mol_type = other DNA

SEQ ID NO: 211538 - DNA, 80 bp, synthetic construct; identical to SEQ ID NO: 26808
  source 1..80: mol_type = other DNA

SEQ ID NO: 211539 - DNA, 80 bp, synthetic construct; identical to SEQ ID NO: 26809
  source 1..80: mol_type = other DNA

SEQ ID NO: 211540 - DNA, 80 bp, synthetic construct; identical to SEQ ID NO: 26810
  source 1..80: mol_type = other DNA

SEQ ID NO: 211541 - DNA, 80 bp, synthetic construct; identical to SEQ ID NO: 26811
  source 1..80: mol_type = other DNA

SEQ ID NO: 211542 - DNA, 80 bp, synthetic construct; identical to SEQ ID NO: 26812
  source 1..80: mol_type = other DNA

SEQ ID NO: 211543 - DNA, 80 bp, synthetic construct; identical to SEQ ID NO: 26813
  source 1..80: mol_type = other DNA

SEQ ID NO: 211544 - DNA, 80 bp, synthetic construct; identical to SEQ ID NO: 26814
  source 1..80: mol_type = other DNA

SEQ ID NO: 211545 - DNA, 80 bp, synthetic construct; identical to SEQ ID NO: 26815
  source 1..80: mol_type = other DNA

SEQ ID NO: 211546 - DNA, 80 bp, synthetic construct; identical to SEQ ID NO: 26816
  source 1..80: mol_type = other DNA

SEQ ID NO: 211547 - DNA, 80 bp, synthetic construct; identical to SEQ ID NO: 26817
  source 1..80: mol_type = other DNA

SEQ ID NO: 211548 - DNA, 80 bp, synthetic construct; identical to SEQ ID NO: 26818
  source 1..80: mol_type = other DNA

SEQ ID NO: 211549 - DNA, 80 bp, synthetic construct; identical to SEQ ID NO: 26819
  source 1..80: mol_type = other DNA

SEQ ID NO: 211550 - DNA, 80 bp, synthetic construct; identical to SEQ ID NO: 26820
  source 1..80: mol_type = other DNA

SEQ ID NO: 211551 - DNA, 80 bp, synthetic construct; identical to SEQ ID NO: 26821
  source 1..80: mol_type = other DNA

SEQ ID NO: 211552 - DNA, 80 bp, synthetic construct; identical to SEQ ID NO: 26822
  source 1..80: mol_type = other DNA

SEQ ID NO: 211553 - DNA, 80 bp, synthetic construct; identical to SEQ ID NO: 26823
  source 1..80: mol_type = other DNA

SEQ ID NO: 211554 - DNA, 80 bp, synthetic construct; identical to SEQ ID NO: 26824
  source 1..80: mol_type = other DNA

SEQ ID NO: 211555 - DNA, 80 bp, synthetic construct; identical to SEQ ID NO: 26825
  source 1..80: mol_type = other DNA

SEQ ID NO: 211556 - DNA, 80 bp, synthetic construct; identical to SEQ ID NO: 26826
  source 1..80: mol_type = other DNA

SEQ ID NO: 211557 - DNA, 80 bp, synthetic construct; identical to SEQ ID NO: 26827
  source 1..80: mol_type = other DNA

SEQ ID NO: 211558 - DNA, 80 bp, synthetic construct; identical to SEQ ID NO: 26828
  source 1..80: mol_type = other DNA

SEQ ID NO: 211559 - DNA, 80 bp, synthetic construct; identical to SEQ ID NO: 26829
  source 1..80: mol_type = other DNA

SEQ ID NO: 211560 - DNA, 80 bp, synthetic construct; identical to SEQ ID NO: 26830
  source 1..80: mol_type = other DNA

SEQ ID NO: 211561 - DNA, 80 bp, synthetic construct; identical to SEQ ID NO: 26831
  source 1..80: mol_type = other DNA

SEQ ID NO: 211562 - DNA, 80 bp, synthetic construct; identical to SEQ ID NO: 26832
  source 1..80: mol_type = other DNA

SEQ ID NO: 211563 - DNA, 80 bp, synthetic construct; identical to SEQ ID NO: 26833
  source 1..80: mol_type = other DNA

SEQ ID NO: 211564 - DNA, 80 bp, synthetic construct; identical to SEQ ID NO: 26834
  source 1..80: mol_type = other DNA

SEQ ID NO: 211565 - DNA, 80 bp, synthetic construct; identical to SEQ ID NO: 26835
  source 1..80: mol_type = other DNA

SEQ ID NO: 211566 - DNA, 80 bp, synthetic construct; identical to SEQ ID NO: 26836
  source 1..80: mol_type = other DNA

SEQ ID NO: 211567 - DNA, 80 bp, synthetic construct; identical to SEQ ID NO: 26837
  source 1..80: mol_type = other DNA

SEQ ID NO: 211568 - DNA, 80 bp, synthetic construct; identical to SEQ ID NO: 26838
  source 1..80: mol_type = other DNA

SEQ ID NO: 211569 - DNA, 80 bp, synthetic construct; identical to SEQ ID NO: 26839
  source 1..80: mol_type = other DNA

SEQ ID NO: 211570 - DNA, 80 bp, synthetic construct; identical to SEQ ID NO: 26840
  source 1..80: mol_type = other DNA

SEQ ID NO: 211571 - DNA, 80 bp, synthetic construct; identical to SEQ ID NO: 26841
  source 1..80: mol_type = other DNA

SEQ ID NO: 211572 - DNA, 80 bp, synthetic construct; identical to SEQ ID NO: 26842
  source 1..80: mol_type = other DNA

SEQ ID NO: 211573 - DNA, 80 bp, synthetic construct; identical to SEQ ID NO: 26843
  source 1..80: mol_type = other DNA

SEQ ID NO: 211574 - DNA, 80 bp, synthetic construct; identical to SEQ ID NO: 26844
  source 1..80: mol_type = other DNA

SEQ ID NO: 211575 - DNA, 80 bp, synthetic construct; identical to SEQ ID NO: 26845
  source 1..80: mol_type = other DNA

SEQ ID NO: 211576 - DNA, 80 bp, synthetic construct; identical to SEQ ID NO: 26846
  source 1..80: mol_type = other DNA

SEQ ID NO: 211577 - DNA, 80 bp, synthetic construct; identical to SEQ ID NO: 26847
  source 1..80: mol_type = other DNA

SEQ ID NO: 211578 - DNA, 80 bp, synthetic construct; identical to SEQ ID NO: 26848
  source 1..80: mol_type = other DNA

SEQ ID NO: 211579 - DNA, 80 bp, synthetic construct; identical to SEQ ID NO: 26849
  source 1..80: mol_type = other DNA

SEQ ID NO: 211580 - DNA, 80 bp, synthetic construct; identical to SEQ ID NO: 26850
  source 1..80: mol_type = other DNA

SEQ ID NO: 211581 - DNA, 80 bp, synthetic construct; identical to SEQ ID NO: 26851
  source 1..80: mol_type = other DNA

SEQ ID NO: 211582 - DNA, 80 bp, synthetic construct; identical to SEQ ID NO: 26852
  source 1..80: mol_type = other DNA

SEQ ID NO: 211583 - DNA, 80 bp, synthetic construct; identical to SEQ ID NO: 26853
  source 1..80: mol_type = other DNA

SEQ ID NO: 211584 - DNA, 80 bp, synthetic construct; identical to SEQ ID NO: 26854
  source 1..80: mol_type = other DNA

SEQ ID NO: 211585 - DNA, 80 bp, synthetic construct; identical to SEQ ID NO: 26855
  source 1..80: mol_type = other DNA

SEQ ID NO: 211586 - DNA, 80 bp, synthetic construct; identical to SEQ ID NO: 26856
  source 1..80: mol_type = other DNA

SEQ ID NO: 211587 - DNA, 80 bp, synthetic construct; identical to SEQ ID NO: 26857
  source 1..80: mol_type = other DNA

SEQ ID NO: 211588 - DNA, 80 bp, synthetic construct; identical to SEQ ID NO: 26858
  source 1..80: mol_type = other DNA

SEQ ID NO: 211589 - DNA, 80 bp, synthetic construct; identical to SEQ ID NO: 26859
  source 1..80: mol_type = other DNA

SEQ ID NO: 211590 - DNA, 80 bp, synthetic construct; identical to SEQ ID NO: 26860
  source 1..80: mol_type = other DNA

SEQ ID NO: 211591 - DNA, 80 bp, synthetic construct; identical to SEQ ID NO: 26861
  source 1..80: mol_type = other DNA

SEQ ID NO: 211592 - DNA, 80 bp, synthetic construct; identical to SEQ ID NO: 26862
  source 1..80: mol_type = other DNA

SEQ ID NO: 211593 - DNA, 80 bp, synthetic construct; identical to SEQ ID NO: 26863
  source 1..80: mol_type = other DNA

SEQ ID NO: 211594 - DNA, 80 bp, synthetic construct; identical to SEQ ID NO: 26864
  source 1..80: mol_type = other DNA

SEQ ID NO: 211595 - DNA, 80 bp, synthetic construct; identical to SEQ ID NO: 26865
  source 1..80: mol_type = other DNA

SEQ ID NO: 211596 - DNA, 80 bp, synthetic construct; identical to SEQ ID NO: 26866
  source 1..80: mol_type = other DNA

SEQ ID NO: 211597 - DNA, 80 bp, synthetic construct; identical to SEQ ID NO: 26867
  source 1..80: mol_type = other DNA

SEQ ID NO: 211598 - DNA, 80 bp, synthetic construct; identical to SEQ ID NO: 26868
  source 1..80: mol_type = other DNA

SEQ ID NO: 211599 - DNA, 80 bp, synthetic construct; identical to SEQ ID NO: 26869
  source 1..80: mol_type = other DNA

SEQ ID NO: 211600 - DNA, 80 bp, synthetic construct; identical to SEQ ID NO: 26870
  source 1..80: mol_type = other DNA

SEQ ID NO: 211601 - DNA, 80 bp, synthetic construct; identical to SEQ ID NO: 26871
  source 1..80: mol_type = other DNA

SEQ ID NO: 211602 - DNA, 80 bp, synthetic construct; identical to SEQ ID NO: 26872
  source 1..80: mol_type = other DNA

SEQ ID NO: 211603 - DNA, 80 bp, synthetic construct; identical to SEQ ID NO: 26873
  source 1..80: mol_type = other DNA

SEQ ID NO: 211604 - DNA, 80 bp, synthetic construct; identical to SEQ ID NO: 26874
  source 1..80: mol_type = other DNA

SEQ ID NO: 211605 - DNA, 80 bp, synthetic construct; identical to SEQ ID NO: 26875
  source 1..80: mol_type = other DNA

SEQ ID NO: 211606 - DNA, 80 bp, synthetic construct; identical to SEQ ID NO: 26876
  source 1..80: mol_type = other DNA

SEQ ID NO: 211607 - DNA, 80 bp, synthetic construct; identical to SEQ ID NO: 26877
  source 1..80: mol_type = other DNA

SEQ ID NO: 211608 - DNA, 80 bp, synthetic construct; identical to SEQ ID NO: 26878
  source 1..80: mol_type = other DNA

SEQ ID NO: 211609 - DNA, 80 bp, synthetic construct; identical to SEQ ID NO: 26879
  source 1..80: mol_type = other DNA

SEQ ID NO: 211610 - DNA, 80 bp, synthetic construct; identical to SEQ ID NO: 26880
  source 1..80: mol_type = other DNA

SEQ ID NO: 211611 - DNA, 80 bp, synthetic construct; identical to SEQ ID NO: 26881
  source 1..80: mol_type = other DNA

SEQ ID NO: 211612 - DNA, 80 bp, synthetic construct; identical to SEQ ID NO: 26882
  source 1..80: mol_type = other DNA

SEQ ID NO: 211613 - DNA, 80 bp, synthetic construct; identical to SEQ ID NO: 26883
  source 1..80: mol_type = other DNA

SEQ ID NO: 211614 - DNA, 80 bp, synthetic construct; identical to SEQ ID NO: 26884
  source 1..80: mol_type = other DNA

SEQ ID NO: 211615 - DNA, 80 bp, synthetic construct; identical to SEQ ID NO: 26885
  source 1..80: mol_type = other DNA

SEQ ID NO: 211616 - DNA, 80 bp, synthetic construct; identical to SEQ ID NO: 26886
  source 1..80: mol_type = other DNA

SEQ ID NO: 211617 - DNA, 80 bp, synthetic construct; identical to SEQ ID NO: 26887
  source 1..80: mol_type = other DNA

SEQ ID NO: 211618 - DNA, 80 bp, synthetic construct; identical to SEQ ID NO: 26888
  source 1..80: mol_type = other DNA

SEQ ID NO: 211619 - DNA, 80 bp, synthetic construct; identical to SEQ ID NO: 26889
  source 1..80: mol_type = other DNA

SEQ ID NO: 211620 - DNA, 80 bp, synthetic construct; identical to SEQ ID NO: 26890
  source 1..80: mol_type = other DNA

SEQ ID NO: 211621 - DNA, 80 bp, synthetic construct; identical to SEQ ID NO: 26891
  source 1..80: mol_type = other DNA

SEQ ID NO: 211622 - DNA, 80 bp, synthetic construct; identical to SEQ ID NO: 26892
  source 1..80: mol_type = other DNA

SEQ ID NO: 211623 - DNA, 80 bp, synthetic construct; identical to SEQ ID NO: 26893
  source 1..80: mol_type = other DNA

SEQ ID NO: 211624 - DNA, 80 bp, synthetic construct; identical to SEQ ID NO: 26894
  source 1..80: mol_type = other DNA

SEQ ID NO: 211625 - DNA, 80 bp, synthetic construct; identical to SEQ ID NO: 26895
  source 1..80: mol_type = other DNA

SEQ ID NO: 211626 - DNA, 80 bp, synthetic construct; identical to SEQ ID NO: 26896
  source 1..80: mol_type = other DNA

SEQ ID NO: 211627 - DNA, 80 bp, synthetic construct; identical to SEQ ID NO: 26897
  source 1..80: mol_type = other DNA

SEQ ID NO: 211628 - DNA, 80 bp, synthetic construct; identical to SEQ ID NO: 26898
  source 1..80: mol_type = other DNA

SEQ ID NO: 211629 - DNA, 80 bp, synthetic construct; identical to SEQ ID NO: 26899
  source 1..80: mol_type = other DNA

SEQ ID NO: 211630 - DNA, 80 bp, synthetic construct; identical to SEQ ID NO: 26900
  source 1..80: mol_type = other DNA

SEQ ID NO: 211631 - DNA, 80 bp, synthetic construct; identical to SEQ ID NO: 26901
  source 1..80: mol_type = other DNA

SEQ ID NO: 211632 - DNA, 80 bp, synthetic construct; identical to SEQ ID NO: 26902
  source 1..80: mol_type = other DNA

SEQ ID NO: 211633 - DNA, 80 bp, synthetic construct; identical to SEQ ID NO: 26903
  source 1..80: mol_type = other DNA

SEQ ID NO: 211634 - DNA, 80 bp, synthetic construct; identical to SEQ ID NO: 26904
  source 1..80: mol_type = other DNA

SEQ ID NO: 211635 - DNA, 80 bp, synthetic construct; identical to SEQ ID NO: 26905
  source 1..80: mol_type = other DNA

SEQ ID NO: 211636 - DNA, 80 bp, synthetic construct; identical to SEQ ID NO: 26906
  source 1..80: mol_type = other DNA

SEQ ID NO: 211637 - DNA, 80 bp, synthetic construct; identical to SEQ ID NO: 26907
  source 1..80: mol_type = other DNA

SEQ ID NO: 211638 - DNA, 80 bp, synthetic construct; identical to SEQ ID NO: 26908
  source 1..80: mol_type = other DNA

SEQ ID NO: 211639 - DNA, 80 bp, synthetic construct; identical to SEQ ID NO: 26909
  source 1..80: mol_type = other DNA

SEQ ID NO: 211640 - DNA, 80 bp, synthetic construct; identical to SEQ ID NO: 26910
  source 1..80: mol_type = other DNA

SEQ ID NO: 211641 - DNA, 80 bp, synthetic construct; identical to SEQ ID NO: 26911
  source 1..80: mol_type = other DNA

SEQ ID NO: 211642 - DNA, 80 bp, synthetic construct; identical to SEQ ID NO: 26912
  source 1..80: mol_type = other DNA

SEQ ID NO: 211643 - DNA, 80 bp, synthetic construct; identical to SEQ ID NO: 26913
  source 1..80: mol_type = other DNA

SEQ ID NO: 211644 - DNA, 80 bp, synthetic construct; identical to SEQ ID NO: 26914
  source 1..80: mol_type = other DNA

SEQ ID NO: 211645 - DNA, 80 bp, synthetic construct; identical to SEQ ID NO: 26915
  source 1..80: mol_type = other DNA

SEQ ID NO: 211646 - DNA, 80 bp, synthetic construct; identical to SEQ ID NO: 26916
  source 1..80: mol_type = other DNA

SEQ ID NO: 211647 - DNA, 80 bp, synthetic construct; identical to SEQ ID NO: 26917
  source 1..80: mol_type = other DNA

SEQ ID NO: 211648 - DNA, 80 bp, synthetic construct; identical to SEQ ID NO: 26918
  source 1..80: mol_type = other DNA

SEQ ID NO: 211649 - DNA, 80 bp, synthetic construct; identical to SEQ ID NO: 26919
  source 1..80: mol_type = other DNA

SEQ ID NO: 211650 - DNA, 80 bp, synthetic construct; identical to SEQ ID NO: 26920
  source 1..80: mol_type = other DNA

SEQ ID NO: 211651 - DNA, 80 bp, synthetic construct; identical to SEQ ID NO: 26921
  source 1..80: mol_type = other DNA

SEQ ID NO: 211652 - DNA, 80 bp, synthetic construct; identical to SEQ ID NO: 26922
  source 1..80: mol_type = other DNA

SEQ ID NO: 211653 - DNA, 80 bp, synthetic construct; identical to SEQ ID NO: 26923
  source 1..80: mol_type = other DNA

SEQ ID NO: 211654 - DNA, 80 bp, synthetic construct; identical to SEQ ID NO: 26924
  source 1..80: mol_type = other DNA

SEQ ID NO: 211655 - DNA, 80 bp, synthetic construct; identical to SEQ ID NO: 26925
  source 1..80: mol_type = other DNA

SEQ ID NO: 211656 - DNA, 80 bp, synthetic construct; identical to SEQ ID NO: 26926
  source 1..80: mol_type = other DNA

SEQ ID NO: 211657 - DNA, 80 bp, synthetic construct; identical to SEQ ID NO: 26927
  source 1..80: mol_type = other DNA

SEQ ID NO: 211658 - DNA, 80 bp, synthetic construct; identical to SEQ ID NO: 26928
  source 1..80: mol_type = other DNA

SEQ ID NO: 211659 - DNA, 80 bp, synthetic construct; identical to SEQ ID NO: 26929
  source 1..80: mol_type = other DNA

SEQ ID NO: 211660 - DNA, 80 bp, synthetic construct; identical to SEQ ID NO: 26930
  source 1..80: mol_type = other DNA

SEQ ID NO: 211661 - DNA, 80 bp, synthetic construct; identical to SEQ ID NO: 26931
  source 1..80: mol_type = other DNA

SEQ ID NO: 211662 - DNA, 80 bp, synthetic construct; identical to SEQ ID NO: 26932
  source 1..80: mol_type = other DNA

SEQ ID NO: 211663 - DNA, 80 bp, synthetic construct; identical to SEQ ID NO: 26933
  source 1..80: mol_type = other DNA

SEQ ID NO: 211664 - DNA, 80 bp, synthetic construct; identical to SEQ ID NO: 26934
  source 1..80: mol_type = other DNA

SEQ ID NO: 211665 - DNA, 80 bp, synthetic construct; identical to SEQ ID NO: 26935
  source 1..80: mol_type = other DNA

SEQ ID NO: 211666 - DNA, 80 bp, synthetic construct; identical to SEQ ID NO: 26936
  source 1..80: mol_type = other DNA

SEQ ID NO: 211667 - DNA, 80 bp, synthetic construct; identical to SEQ ID NO: 26937
  source 1..80: mol_type = other DNA

SEQ ID NO: 211668 - DNA, 80 bp, synthetic construct; identical to SEQ ID NO: 26938
  source 1..80: mol_type = other DNA

SEQ ID NO: 211669 - DNA, 80 bp, synthetic construct; identical to SEQ ID NO: 26939
  source 1..80: mol_type = other DNA

SEQ ID NO: 211670 - DNA, 80 bp, synthetic construct; identical to SEQ ID NO: 26940
  source 1..80: mol_type = other DNA

SEQ ID NO: 211671 - DNA, 80 bp, synthetic construct; identical to SEQ ID NO: 26941
  source 1..80: mol_type = other DNA

SEQ ID NO: 211672 - DNA, 80 bp, synthetic construct; identical to SEQ ID NO: 26942
  source 1..80: mol_type = other DNA

SEQ ID NO: 211673 - DNA, 80 bp, synthetic construct; identical to SEQ ID NO: 26943
  source 1..80: mol_type = other DNA

SEQ ID NO: 211674 - DNA, 80 bp, synthetic construct; identical to SEQ ID NO: 26944
  source 1..80: mol_type = other DNA

SEQ ID NO: 211675 - DNA, 80 bp, synthetic construct; identical to SEQ ID NO: 26945
  source 1..80: mol_type = other DNA

SEQ ID NO: 211676 - DNA, 80 bp, synthetic construct; identical to SEQ ID NO: 26946
  source 1..80: mol_type = other DNA

SEQ ID NO: 211677 - DNA, 80 bp, synthetic construct; identical to SEQ ID NO: 26947
  source 1..80: mol_type = other DNA

SEQ ID NO: 211678 - DNA, 80 bp, synthetic construct; identical to SEQ ID NO: 26948
  source 1..80: mol_type = other DNA

SEQ ID NO: 211679 - DNA, 80 bp, synthetic construct; identical to SEQ ID NO: 26949
  source 1..80: mol_type = other DNA

SEQ ID NO: 211680 - DNA, 80 bp, synthetic construct; identical to SEQ ID NO: 26950
  source 1..80: mol_type = other DNA

SEQ ID NO: 211681 - DNA, 80 bp, synthetic construct; identical to SEQ ID NO: 26951
  source 1..80: mol_type = other DNA

SEQ ID NO: 211682 - DNA, 80 bp, synthetic construct; identical to SEQ ID NO: 26952
  source 1..80: mol_type = other DNA

SEQ ID NO: 211683 - DNA, 80 bp, synthetic construct; identical to SEQ ID NO: 26953
  source 1..80: mol_type = other DNA

SEQ ID NO: 211684 - DNA, 80 bp, synthetic construct; identical to SEQ ID NO: 26954
  source 1..80: mol_type = other DNA

SEQ ID NO: 211685 - DNA, 80 bp, synthetic construct; identical to SEQ ID NO: 26955
  source 1..80: mol_type = other DNA

SEQ ID NO: 211686 - DNA, 80 bp, synthetic construct; identical to SEQ ID NO: 26956
  source 1..80: mol_type = other DNA

SEQ ID NO: 211687 - DNA, 80 bp, synthetic construct; identical to SEQ ID NO: 26957
  source 1..80: mol_type = other DNA

SEQ ID NO: 211688 - DNA, 80 bp, synthetic construct; identical to SEQ ID NO: 26958
  source 1..80: mol_type = other DNA

SEQ ID NO: 211689 - DNA, 80 bp, synthetic construct; identical to SEQ ID NO: 26959
  source 1..80: mol_type = other DNA

SEQ ID NO: 211690 - DNA, 80 bp, synthetic construct; identical to SEQ ID NO: 26960
  source 1..80: mol_type = other DNA

SEQ ID NO: 211691 - DNA, 80 bp, synthetic construct; identical to SEQ ID NO: 26961
  source 1..80: mol_type = other DNA

SEQ ID NO: 211692 - DNA, 80 bp, synthetic construct; identical to SEQ ID NO: 26962
  source 1..80: mol_type = other DNA

SEQ ID NO: 211693 - DNA, 80 bp, synthetic construct; identical to SEQ ID NO: 26963
  source 1..80: mol_type = other DNA

SEQ ID NO: 211694 - DNA, 80 bp, synthetic construct; identical to SEQ ID NO: 26964
  source 1..80: mol_type = other DNA

SEQ ID NO: 211695 - DNA, 80 bp, synthetic construct; identical to SEQ ID NO: 26965
  source 1..80: mol_type = other DNA

SEQ ID NO: 211696 - DNA, 80 bp, synthetic construct; identical to SEQ ID NO: 26966
  source 1..80: mol_type = other DNA

SEQ ID NO: 211697 - DNA, 80 bp, synthetic construct; identical to SEQ ID NO: 26967
  source 1..80: mol_type = other DNA

SEQ ID NO: 211698 - DNA, 80 bp, synthetic construct; identical to SEQ ID NO: 26968
  source 1..80: mol_type = other DNA

SEQ ID NO: 211699 - DNA, 80 bp, synthetic construct; identical to SEQ ID NO: 26969
  source 1..80: mol_type = other DNA

SEQ ID NO: 211700 - DNA, 80 bp, synthetic construct; identical to SEQ ID NO: 26970
  source 1..80: mol_type = other DNA

SEQ ID NO: 211701 - DNA, 80 bp, synthetic construct; identical to SEQ ID NO: 26971
  source 1..80: mol_type = other DNA

SEQ ID NO: 211702 - DNA, 80 bp, synthetic construct; identical to SEQ ID NO: 26972
  source 1..80: mol_type = other DNA

SEQ ID NO: 211703 - DNA, 80 bp, synthetic construct; identical to SEQ ID NO: 26973
  source 1..80: mol_type = other DNA

SEQ ID NO: 211704 - DNA, 80 bp, synthetic construct; identical to SEQ ID NO: 26974
  source 1..80: mol_type = other DNA

SEQ ID NO: 211705 - DNA, 80 bp, synthetic construct; identical to SEQ ID NO: 26975
  source 1..80: mol_type = other DNA

SEQ ID NO: 211706 - DNA, 80 bp, synthetic construct; identical to SEQ ID NO: 26976
  source 1..80: mol_type = other DNA

SEQ ID NO: 211707 - DNA, 80 bp, synthetic construct; identical to SEQ ID NO: 26977
  source 1..80: mol_type = other DNA

SEQ ID NO: 211708 - DNA, 80 bp, synthetic construct; identical to SEQ ID NO: 26978
  source 1..80: mol_type = other DNA

SEQ ID NO: 211709 - DNA, 80 bp, synthetic construct; identical to SEQ ID NO: 26979
  source 1..80: mol_type = other DNA

SEQ ID NO: 211710 - DNA, 80 bp, synthetic construct; identical to SEQ ID NO: 26980
  source 1..80: mol_type = other DNA

SEQ ID NO: 211711 - DNA, 80 bp, synthetic construct; identical to SEQ ID NO: 26981
  source 1..80: mol_type = other DNA

SEQ ID NO: 211712 - DNA, 80 bp, synthetic construct; identical to SEQ ID NO: 26982
  source 1..80: mol_type = other DNA

SEQ ID NO: 211713 - DNA, 80 bp, synthetic construct; identical to SEQ ID NO: 26983
  source 1..80: mol_type = other DNA

SEQ ID NO: 211714 - DNA, 80 bp, synthetic construct; identical to SEQ ID NO: 26984
  source 1..80: mol_type = other DNA

SEQ ID NO: 211715 - DNA, 80 bp, synthetic construct; identical to SEQ ID NO: 26985
  source 1..80: mol_type = other DNA

SEQ ID NO: 211716 - DNA, 80 bp, synthetic construct; identical to SEQ ID NO: 26986
  source 1..80: mol_type = other DNA

SEQ ID NO: 211717 - DNA, 80 bp, synthetic construct; identical to SEQ ID NO: 26987
  source 1..80: mol_type = other DNA

SEQ ID NO: 211718 - DNA, 80 bp, synthetic construct; identical to SEQ ID NO: 26988
  source 1..80: mol_type = other DNA

SEQ ID NO: 211719 - DNA, 80 bp, synthetic construct; identical to SEQ ID NO: 26989
  source 1..80: mol_type = other DNA

SEQ ID NO: 211720 - DNA, 80 bp, synthetic construct; identical to SEQ ID NO: 26990
  source 1..80: mol_type = other DNA

SEQ ID NO: 211721 - DNA, 80 bp, synthetic construct; identical to SEQ ID NO: 26991
  source 1..80: mol_type = other DNA

SEQ ID NO: 211722 - DNA, 80 bp, synthetic construct; identical to SEQ ID NO: 26992
  source 1..80: mol_type = other DNA

SEQ ID NO: 211723 - DNA, 80 bp, synthetic construct; identical to SEQ ID NO: 26993
  source 1..80: mol_type = other DNA

SEQ ID NO: 211724 - DNA, 80 bp, synthetic construct; identical to SEQ ID NO: 26994
  source 1..80: mol_type = other DNA

SEQ ID NO: 211725 - DNA, 80 bp, synthetic construct; identical to SEQ ID NO: 26995
  source 1..80: mol_type = other DNA

SEQ ID NO: 211726 - DNA, 80 bp, synthetic construct; identical to SEQ ID NO: 26996
  source 1..80: mol_type = other DNA

SEQ ID NO: 211727 - DNA, 80 bp, synthetic construct; identical to SEQ ID NO: 26997
  source 1..80: mol_type = other DNA

SEQ ID NO: 211728 - DNA, 80 bp, synthetic construct; identical to SEQ ID NO: 26998
  source 1..80: mol_type = other DNA

SEQ ID NO: 211729 - DNA, 80 bp, synthetic construct; identical to SEQ ID NO: 26999
  source 1..80: mol_type = other DNA

SEQ ID NO: 211730 - DNA, 80 bp, synthetic construct; identical to SEQ ID NO: 27000
  source 1..80: mol_type = other DNA

SEQ ID NO: 211731 - DNA, 80 bp, synthetic construct; identical to SEQ ID NO: 27001
  source 1..80: mol_type = other DNA

SEQ ID NO: 211732 - DNA, 80 bp, synthetic construct; identical to SEQ ID NO: 27002
  source 1..80: mol_type = other DNA

SEQ ID NO: 211733 - DNA, 80 bp, synthetic construct; identical to SEQ ID NO: 27003
  source 1..80: mol_type = other DNA

SEQ ID NO: 211734 - DNA, 80 bp, synthetic construct; identical to SEQ ID NO: 27004
  source 1..80: mol_type = other DNA

SEQ ID NO: 211735 - DNA, 80 bp, synthetic construct; identical to SEQ ID NO: 27005
  source 1..80: mol_type = other DNA

SEQ ID NO: 211736 - DNA, 80 bp, synthetic construct; identical to SEQ ID NO: 27006
  source 1..80: mol_type = other DNA

SEQ ID NO: 211737 - DNA, 80 bp, synthetic construct; identical to SEQ ID NO: 27007
  source 1..80: mol_type = other DNA

SEQ ID NO: 211738 - DNA, 80 bp, synthetic construct; identical to SEQ ID NO: 27008
  source 1..80: mol_type = other DNA

SEQ ID NO: 211739 - DNA, 80 bp, synthetic construct; identical to SEQ ID NO: 27009
  source 1..80: mol_type = other DNA

SEQ ID NO: 211740 - DNA, 80 bp, synthetic construct; identical to SEQ ID NO: 27010
  source 1..80: mol_type = other DNA

SEQ ID NO: 211741 - DNA, 80 bp, synthetic construct; identical to SEQ ID NO: 27011
  source 1..80: mol_type = other DNA

SEQ ID NO: 211742 - DNA, 80 bp, synthetic construct; identical to SEQ ID NO: 27012
  source 1..80: mol_type = other DNA

SEQ ID NO: 211743 - DNA, 80 bp, synthetic construct; identical to SEQ ID NO: 27013
  source 1..80: mol_type = other DNA

SEQ ID NO: 211744 - DNA, 80 bp, synthetic construct; identical to SEQ ID NO: 27014
  source 1..80: mol_type = other DNA

SEQ ID NO: 211745 - DNA, 80 bp, synthetic construct; identical to SEQ ID NO: 27015
  source 1..80: mol_type = other DNA

SEQ ID NO: 211746 - DNA, 80 bp, synthetic construct; identical to SEQ ID NO: 27016
  source 1..80: mol_type = other DNA

SEQ ID NO: 211747 - DNA, 80 bp, synthetic construct; identical to SEQ ID NO: 27017
  source 1..80: mol_type = other DNA

SEQ ID NO: 211748 - DNA, 80 bp, synthetic construct; identical to SEQ ID NO: 27018
  source 1..80: mol_type = other DNA

SEQ ID NO: 211749 - DNA, 80 bp, synthetic construct; identical to SEQ ID NO: 27019
  source 1..80: mol_type = other DNA

SEQ ID NO: 211750 - DNA, 80 bp, synthetic construct; identical to SEQ ID NO: 27020
  source 1..80: mol_type = other DNA

SEQ ID NO: 211751 - DNA, 80 bp, synthetic construct; identical to SEQ ID NO: 27021
  source 1..80: mol_type = other DNA

SEQ ID NO: 211752 - DNA, 80 bp, synthetic construct; identical to SEQ ID NO: 27022
  source 1..80: mol_type = other DNA

SEQ ID NO: 211753 - DNA, 80 bp, synthetic construct; identical to SEQ ID NO: 27023
  source 1..80: mol_type = other DNA

SEQ ID NO: 211754 - DNA, 80 bp, synthetic construct; identical to SEQ ID NO: 27024
  source 1..80: mol_type = other DNA

SEQ ID NO: 211755 - DNA, 80 bp, synthetic construct; identical to SEQ ID NO: 27025
  source 1..80: mol_type = other DNA

SEQ ID NO: 211756 - DNA, 80 bp, synthetic construct; identical to SEQ ID NO: 27026
  source 1..80: mol_type = other DNA

SEQ ID NO: 211757 - DNA, 80 bp, synthetic construct; identical to SEQ ID NO: 27027
  source 1..80: mol_type = other DNA

SEQ ID NO: 211758 - DNA, 80 bp, synthetic construct; identical to SEQ ID NO: 27028
  source 1..80: mol_type = other DNA

SEQ ID NO: 211759 - DNA, 80 bp, synthetic construct; identical to SEQ ID NO: 27029
  source 1..80: mol_type = other DNA

SEQ ID NO: 211760 - DNA, 80 bp, synthetic construct; identical to SEQ ID NO: 27030
  source 1..80: mol_type = other DNA

SEQ ID NO: 211761 - DNA, 80 bp, synthetic construct; identical to SEQ ID NO: 27031
  source 1..80: mol_type = other DNA

SEQ ID NO: 211762 - DNA, 80 bp, synthetic construct; identical to SEQ ID NO: 27032
  source 1..80: mol_type = other DNA

SEQ ID NO: 211763 - DNA, 80 bp, synthetic construct; identical to SEQ ID NO: 27033
  source 1..80: mol_type = other DNA

SEQ ID NO: 211764 - DNA, 80 bp, synthetic construct; identical to SEQ ID NO: 27034
  source 1..80: mol_type = other DNA

SEQ ID NO: 211765 - DNA, 80 bp, synthetic construct; identical to SEQ ID NO: 27035
  source 1..80: mol_type = other DNA

SEQ ID NO: 211766 - DNA, 80 bp, synthetic construct; identical to SEQ ID NO: 27036
  source 1..80: mol_type = other DNA

SEQ ID NO: 211767 - DNA, 80 bp, synthetic construct; identical to SEQ ID NO: 27037
  source 1..80: mol_type = other DNA

SEQ ID NO: 211768 - DNA, 80 bp, synthetic construct; identical to SEQ ID NO: 27038
  source 1..80: mol_type = other DNA

SEQ ID NO: 211769 - DNA, 80 bp, synthetic construct; identical to SEQ ID NO: 27039
  source 1..80: mol_type = other DNA

SEQ ID NO: 211770 - DNA, 80 bp, synthetic construct; identical to SEQ ID NO: 27040
  source 1..80: mol_type = other DNA

SEQ ID NO: 211771 - DNA, 80 bp, synthetic construct; identical to SEQ ID NO: 27041
  source 1..80: mol_type = other DNA

SEQ ID NO: 211772 - DNA, 80 bp, synthetic construct; identical to SEQ ID NO: 27042
  source 1..80: mol_type = other DNA

SEQ ID NO: 211773 - DNA, 80 bp, synthetic construct; identical to SEQ ID NO: 27043
  source 1..80: mol_type = other DNA

SEQ ID NO: 211774 - DNA, 80 bp, synthetic construct; identical to SEQ ID NO: 27044
  source 1..80: mol_type = other DNA

SEQ ID NO: 211775 - DNA, 80 bp, synthetic construct; identical to SEQ ID NO: 27045
  source 1..80: mol_type = other DNA

SEQ ID NO: 211776 - DNA, 80 bp, synthetic construct; identical to SEQ ID NO: 27046
  source 1..80: mol_type = other DNA

SEQ ID NO: 211777 - DNA, 80 bp, synthetic construct; identical to SEQ ID NO: 27047
  source 1..80: mol_type = other DNA

SEQ ID NO: 211778 - DNA, 80 bp, synthetic construct; identical to SEQ ID NO: 27048
  source 1..80: mol_type = other DNA

SEQ ID NO: 211779 - DNA, 80 bp, synthetic construct; identical to SEQ ID NO: 27049
  source 1..80: mol_type = other DNA

SEQ ID NO: 211780 - DNA, 80 bp, synthetic construct; identical to SEQ ID NO: 27050
  source 1..80: mol_type = other DNA

SEQ ID NO: 211781 - DNA, 80 bp, synthetic construct; identical to SEQ ID NO: 27051
  source 1..80: mol_type = other DNA

SEQ ID NO: 211782 - DNA, 80 bp, synthetic construct; identical to SEQ ID NO: 27052
  source 1..80: mol_type = other DNA

SEQ ID NO: 211783 - DNA, 80 bp, synthetic construct; identical to SEQ ID NO: 27053
  source 1..80: mol_type = other DNA

SEQ ID NO: 211784 - DNA, 80 bp, synthetic construct; identical to SEQ ID NO: 27054
  source 1..80: mol_type = other DNA

SEQ ID NO: 211785 - DNA, 80 bp, synthetic construct; identical to SEQ ID NO: 27055
  source 1..80: mol_type = other DNA

SEQ ID NO: 211786 - DNA, 80 bp, synthetic construct; identical to SEQ ID NO: 27056
  source 1..80: mol_type = other DNA

SEQ ID NO: 211787 - DNA, 80 bp, synthetic construct; identical to SEQ ID NO: 27057
  source 1..80: mol_type = other DNA

SEQ ID NO: 211788 - DNA, 80 bp, synthetic construct; identical to SEQ ID NO: 27058
  source 1..80: mol_type = other DNA

SEQ ID NO: 211789 - DNA, 80 bp, synthetic construct; identical to SEQ ID NO: 27059
  source 1..80: mol_type = other DNA

SEQ ID NO: 211790 - DNA, 80 bp, synthetic construct; identical to SEQ ID NO: 27060
  source 1..80: mol_type = other DNA

SEQ ID NO: 211791 - DNA, 80 bp, synthetic construct; identical to SEQ ID NO: 27061
  source 1..80: mol_type = other DNA

SEQ ID NO: 211792 - DNA, 80 bp, synthetic construct; identical to SEQ ID NO: 27062
  source 1..80: mol_type = other DNA

SEQ ID NO: 211793 - DNA, 80 bp, synthetic construct; identical to SEQ ID NO: 27063
  source 1..80: mol_type = other DNA

SEQ ID NO: 211794 - DNA, 80 bp, synthetic construct; identical to SEQ ID NO: 27064
  source 1..80: mol_type = other DNA

SEQ ID NO: 211795 - DNA, 80 bp, synthetic construct; identical to SEQ ID NO: 27065
  source 1..80: mol_type = other DNA

SEQ ID NO: 211796 - DNA, 80 bp, synthetic construct; identical to SEQ ID NO: 27066
  source 1..80: mol_type = other DNA

SEQ ID NO: 211797 - DNA, 80 bp, synthetic construct; identical to SEQ ID NO: 27067
  source 1..80: mol_type = other DNA

SEQ ID NO: 211798 - DNA, 80 bp, synthetic construct; identical to SEQ ID NO: 27068
  source 1..80: mol_type = other DNA

SEQ ID NO: 211799 - DNA, 80 bp, synthetic construct; identical to SEQ ID NO: 27069
  source 1..80: mol_type = other DNA

SEQ ID NO: 211800 - DNA, 80 bp, synthetic construct; identical to SEQ ID NO: 27070
  source 1..80: mol_type = other DNA

SEQ ID NO: 211801 - DNA, 80 bp, synthetic construct; identical to SEQ ID NO: 27071
  source 1..80: mol_type = other DNA

SEQ ID NO: 211802 - DNA, 80 bp, synthetic construct; identical to SEQ ID NO: 27072
  source 1..80: mol_type = other DNA

SEQ ID NO: 211803 - DNA, 80 bp, synthetic construct; identical to SEQ ID NO: 27073
  source 1..80: mol_type = other DNA

SEQ ID NO: 211804 - DNA, 80 bp, synthetic construct; identical to SEQ ID NO: 27074
  source 1..80: mol_type = other DNA

SEQ ID NO: 211805 - DNA, 80 bp, synthetic construct; identical to SEQ ID NO: 27075
  source 1..80: mol_type = other DNA

SEQ ID NO: 211806 - DNA, 80 bp, synthetic construct; identical to SEQ ID NO: 27076
  source 1..80: mol_type = other DNA

SEQ ID NO: 211807 - DNA, 80 bp, synthetic construct; identical to SEQ ID NO: 27077
  source 1..80: mol_type = other DNA

SEQ ID NO: 211808 - DNA, 80 bp, synthetic construct; identical to SEQ ID NO: 27078
  source 1..80: mol_type = other DNA

SEQ ID NO: 211809 - DNA, 80 bp, synthetic construct; identical to SEQ ID NO: 27079
  source 1..80: mol_type = other DNA

SEQ ID NO: 211810 - DNA, 80 bp, synthetic construct; identical to SEQ ID NO: 27080
  source 1..80: mol_type = other DNA

SEQ ID NO: 211811 - DNA, 80 bp, synthetic construct; identical to SEQ ID NO: 27081
  source 1..80: mol_type = other DNA

SEQ ID NO: 211812 - DNA, 80 bp, synthetic construct; identical to SEQ ID NO: 27082
  source 1..80: mol_type = other DNA

SEQ ID NO: 211813 - DNA, 80 bp, synthetic construct; identical to SEQ ID NO: 27083
  source 1..80: mol_type = other DNA

SEQ ID NO: 211814 - DNA, 80 bp, synthetic construct; identical to SEQ ID NO: 27084
  source 1..80: mol_type = other DNA

SEQ ID NO: 211815 - DNA, 80 bp, synthetic construct; identical to SEQ ID NO: 27085
  source 1..80: mol_type = other DNA

SEQ ID NO: 211816 - DNA, 80 bp, synthetic construct; identical to SEQ ID NO: 27086
  source 1..80: mol_type = other DNA

SEQ ID NO: 211817 - DNA, 80 bp, synthetic construct; identical to SEQ ID NO: 27087
  source 1..80: mol_type = other DNA

SEQ ID NO: 211818 - DNA, 80 bp, synthetic construct; identical to SEQ ID NO: 27088
  source 1..80: mol_type = other DNA

SEQ ID NO: 211819 - DNA, 80 bp, synthetic construct; identical to SEQ ID NO: 27089
  source 1..80: mol_type = other DNA

SEQ ID NO: 211820 - DNA, 80 bp, synthetic construct; identical to SEQ ID NO: 27090
  source 1..80: mol_type = other DNA

SEQ ID NO: 211821 - DNA, 80 bp, synthetic construct; identical to SEQ ID NO: 27091
  source 1..80: mol_type = other DNA

SEQ ID NO: 211822 - DNA, 80 bp, synthetic construct; identical to SEQ ID NO: 27092
  source 1..80: mol_type = other DNA

SEQ ID NO: 211823 - DNA, 80 bp, synthetic construct; identical to SEQ ID NO: 27093
  source 1..80: mol_type = other DNA

SEQ ID NO: 211824 - DNA, 80 bp, synthetic construct; identical to SEQ ID NO: 27094
  source 1..80: mol_type = other DNA

SEQ ID NO: 211825 - DNA, 80 bp, synthetic construct; identical to SEQ ID NO: 27095
  source 1..80: mol_type = other DNA

SEQ ID NO: 211826 - DNA, 80 bp, synthetic construct; identical to SEQ ID NO: 27096
  source 1..80: mol_type = other DNA

SEQ ID NO: 211827 - DNA, 80 bp, synthetic construct; identical to SEQ ID NO: 27097
  source 1..80: mol_type = other DNA

SEQ ID NO: 211828 - DNA, 80 bp, synthetic construct; identical to SEQ ID NO: 27098
  source 1..80: mol_type = other DNA

SEQ ID NO: 211829 - DNA, 80 bp, synthetic construct; identical to SEQ ID NO: 27099
  source 1..80: mol_type = other DNA

SEQ ID NO: 211830 - DNA, 80 bp, synthetic construct; identical to SEQ ID NO: 27100
  source 1..80: mol_type = other DNA

SEQ ID NO: 211831 - DNA, 80 bp, synthetic construct; identical to SEQ ID NO: 27101
  source 1..80: mol_type = other DNA

SEQ ID NO: 211832 - DNA, 80 bp, synthetic construct; identical to SEQ ID NO: 27102
  source 1..80: mol_type = other DNA

SEQ ID NO: 211833 - DNA, 80 bp, synthetic construct; identical to SEQ ID NO: 27103
  source 1..80: mol_type = other DNA

SEQ ID NO: 211834 - DNA, 80 bp, synthetic construct; identical to SEQ ID NO: 27104
  source 1..80: mol_type = other DNA

SEQ ID NO: 211835 - DNA, 80 bp, synthetic construct; identical to SEQ ID NO: 27105
  source 1..80: mol_type = other DNA

SEQ ID NO: 211836 - DNA, 80 bp, synthetic construct; identical to SEQ ID NO: 27106
  source 1..80: mol_type = other DNA

SEQ ID NO: 211837 - DNA, 80 bp, synthetic construct; identical to SEQ ID NO: 27107
  source 1..80: mol_type = other DNA

SEQ ID NO: 211838 - DNA, 80 bp, synthetic construct; identical to SEQ ID NO: 27108
  source 1..80: mol_type = other DNA

SEQ ID NO: 211839 - DNA, 80 bp, synthetic construct; identical to SEQ ID NO: 27109
  source 1..80: mol_type = other DNA

SEQ ID NO: 211840 - DNA, 80 bp, synthetic construct; identical to SEQ ID NO: 27110
  source 1..80: mol_type = other DNA

SEQ ID NO: 211841 - DNA, 80 bp, synthetic construct; identical to SEQ ID NO: 27111
  source 1..80: mol_type = other DNA

SEQ ID NO: 211842 - DNA, 80 bp, synthetic construct; identical to SEQ ID NO: 27112
  source 1..80: mol_type = other DNA

SEQ ID NO: 211843 - DNA, 80 bp, synthetic construct; identical to SEQ ID NO: 27113
  source 1..80: mol_type = other DNA

SEQ ID NO: 211844 - DNA, 80 bp, synthetic construct; identical to SEQ ID NO: 27114
  source 1..80: mol_type = other DNA

SEQ ID NO: 211845 - DNA, 80 bp, synthetic construct; identical to SEQ ID NO: 27115
  source 1..80: mol_type = other DNA

SEQ ID NO: 211846 - DNA, 80 bp, synthetic construct; identical to SEQ ID NO: 27116
  source 1..80: mol_type = other DNA

SEQ ID NO: 211847 - DNA, 80 bp, synthetic construct; identical to SEQ ID NO: 27117
  source 1..80: mol_type = other DNA

SEQ ID NO: 211848 - DNA, 80 bp, synthetic construct; identical to SEQ ID NO: 27118
  source 1..80: mol_type = other DNA

SEQ ID NO: 211849 - DNA, 80 bp, synthetic construct; identical to SEQ ID NO: 27119
  source 1..80: mol_type = other DNA

SEQ ID NO: 211850 - DNA, 80 bp, synthetic construct; identical to SEQ ID NO: 27120
  source 1..80: mol_type = other DNA

SEQ ID NO: 211851 - DNA, 80 bp, synthetic construct; identical to SEQ ID NO: 27121
  source 1..80: mol_type = other DNA

SEQ ID NO: 211852 - DNA, 80 bp, synthetic construct; identical to SEQ ID NO: 27122
  source 1..80: mol_type = other DNA

SEQ ID NO: 211853 - DNA, 80 bp, synthetic construct; identical to SEQ ID NO: 27123
  source 1..80: mol_type = other DNA

SEQ ID NO: 211854 - DNA, 80 bp, synthetic construct; identical to SEQ ID NO: 27124
  source 1..80: mol_type = other DNA

SEQ ID NO: 211855 - DNA, 80 bp, synthetic construct; identical to SEQ ID NO: 27125
  source 1..80: mol_type = other DNA

SEQ ID NO: 211856 - DNA, 80 bp, synthetic construct; identical to SEQ ID NO: 27126
  source 1..80: mol_type = other DNA

SEQ ID NO: 211857 - DNA, 80 bp, synthetic construct; identical to SEQ ID NO: 27127
  source 1..80: mol_type = other DNA

SEQ ID NO: 211858 - DNA, 80 bp, synthetic construct; identical to SEQ ID NO: 27128
  source 1..80: mol_type = other DNA

SEQ ID NO: 211859 - DNA, 80 bp, synthetic construct; identical to SEQ ID NO: 27129
  source 1..80: mol_type = other DNA

SEQ ID NO: 211860 - DNA, 80 bp, synthetic construct; identical to SEQ ID NO: 27130
  source 1..80: mol_type = other DNA

SEQ ID NO: 211861 - DNA, 80 bp, synthetic construct; identical to SEQ ID NO: 27131
  source 1..80: mol_type = other DNA

SEQ ID NO: 211862 - DNA, 80 bp, synthetic construct; identical to SEQ ID NO: 27132
  source 1..80: mol_type = other DNA

SEQ ID NO: 211863 - DNA, 80 bp, synthetic construct; identical to SEQ ID NO: 27133
  source 1..80: mol_type = other DNA

SEQ ID NO: 211864 - DNA, 80 bp, synthetic construct; identical to SEQ ID NO: 27134
  source 1..80: mol_type = other DNA

SEQ ID NO: 211865 - DNA, 80 bp, synthetic construct; identical to SEQ ID NO: 27135
  source 1..80: mol_type = other DNA

SEQ ID NO: 211866 - DNA, 80 bp, synthetic construct; identical to SEQ ID NO: 27136
  source 1..80: mol_type = other DNA

SEQ ID NO: 211867 - DNA, 80 bp, synthetic construct; identical to SEQ ID NO: 27137
  source 1..80: mol_type = other DNA

SEQ ID NO: 211868 - DNA, 80 bp, synthetic construct; identical to SEQ ID NO: 27138
  source 1..80: mol_type = other DNA

SEQ ID NO: 211869 - DNA, 80 bp, synthetic construct; identical to SEQ ID NO: 27139
  source 1..80: mol_type = other DNA

SEQ ID NO: 211870 - DNA, 80 bp, synthetic construct; identical to SEQ ID NO: 27140
  source 1..80: mol_type = other DNA

SEQ ID NO: 211871 - DNA, 80 bp, synthetic construct; identical to SEQ ID NO: 27141
  source 1..80: mol_type = other DNA

SEQ ID NO: 211872 - DNA, 80 bp, synthetic construct; identical to SEQ ID NO: 27142
  source 1..80: mol_type = other DNA

SEQ ID NO: 211873 - DNA, 80 bp, synthetic construct; identical to SEQ ID NO: 27143
  source 1..80: mol_type = other DNA

SEQ ID NO: 211874 - DNA, 80 bp, synthetic construct; identical to SEQ ID NO: 27144
  source 1..80: mol_type = other DNA

SEQ ID NO: 211875 - DNA, 80 bp, synthetic construct; identical to SEQ ID NO: 27145
  source 1..80: mol_type = other DNA

SEQ ID NO: 211876 - DNA, 80 bp, synthetic construct; identical to SEQ ID NO: 27146
  source 1..80: mol_type = other DNA

SEQ ID NO: 211877 - DNA, 80 bp, synthetic construct; identical to SEQ ID NO: 27147
  source 1..80: mol_type = other DNA

SEQ ID NO: 211878 - DNA, 80 bp, synthetic construct; identical to SEQ ID NO: 27148
  source 1..80: mol_type = other DNA

SEQ ID NO: 211879 - DNA, 80 bp, synthetic construct; identical to SEQ ID NO: 27149
  source 1..80: mol_type = other DNA

SEQ ID NO: 211880 - DNA, 80 bp, synthetic construct; identical to SEQ ID NO: 27150
  source 1..80: mol_type = other DNA

SEQ ID NO: 211881 - DNA, 80 bp, synthetic construct; identical to SEQ ID NO: 27151
  source 1..80: mol_type = other DNA

SEQ ID NO: 211882 - DNA, 80 bp, synthetic construct; identical to SEQ ID NO: 27152
  source 1..80: mol_type = other DNA

SEQ ID NO: 211883 - DNA, 80 bp, synthetic construct; identical to SEQ ID NO: 27153
  source 1..80: mol_type = other DNA

SEQ ID NO: 211884 - DNA, 80 bp, synthetic construct; identical to SEQ ID NO: 27154
  source 1..80: mol_type = other DNA

SEQ ID NO: 211885 - DNA, 80 bp, synthetic construct; identical to SEQ ID NO: 27155
  source 1..80: mol_type = other DNA

SEQ ID NO: 211886 - DNA, 80 bp, synthetic construct; identical to SEQ ID NO: 27156
  source 1..80: mol_type = other DNA

SEQ ID NO: 211887 - DNA, 80 bp, synthetic construct; identical to SEQ ID NO: 27157
  source 1..80: mol_type = other DNA

SEQ ID NO: 211888 - DNA, 80 bp, synthetic construct; identical to SEQ ID NO: 27158
  source 1..80: mol_type = other DNA

SEQ ID NO: 211889 - DNA, 80 bp, synthetic construct; identical to SEQ ID NO: 27159
  source 1..80: mol_type = other DNA

SEQ ID NO: 211890 - DNA, 80 bp, synthetic construct; identical to SEQ ID NO: 27160
  source 1..80: mol_type = other DNA

SEQ ID NO: 211891 - DNA, 80 bp, synthetic construct; identical to SEQ ID NO: 27161
  source 1..80: mol_type = other DNA

SEQ ID NO: 211892 - DNA, 80 bp, synthetic construct; identical to SEQ ID NO: 27162
  source 1..80: mol_type = other DNA

SEQ ID NO: 211893 - DNA, 80 bp, synthetic construct; identical to SEQ ID NO: 27163
  source 1..80: mol_type = other DNA

SEQ ID NO: 211894 - DNA, 80 bp, synthetic construct; identical to SEQ ID NO: 27164
  source 1..80: mol_type = other DNA

SEQ ID NO: 211895 - DNA, 80 bp, synthetic construct; identical to SEQ ID NO: 27165
  source 1..80: mol_type = other DNA

SEQ ID NO: 211896 - DNA, 80 bp, synthetic construct; identical to SEQ ID NO: 27166
  source 1..80: mol_type = other DNA

SEQ ID NO: 211897 - DNA, 80 bp, synthetic construct; identical to SEQ ID NO: 27167
  source 1..80: mol_type = other DNA

SEQ ID NO: 211898 - DNA, 80 bp, synthetic construct; identical to SEQ ID NO: 27168
  source 1..80: mol_type = other DNA

SEQ ID NO: 211899 - DNA, 80 bp, synthetic construct; identical to SEQ ID NO: 27169
  source 1..80: mol_type = other DNA

SEQ ID NO: 211900 - DNA, 80 bp, synthetic construct; identical to SEQ ID NO: 27170
  source 1..80: mol_type = other DNA

SEQ ID NO: 211901 - DNA, 80 bp, synthetic construct; identical to SEQ ID NO: 27171
  source 1..80: mol_type = other DNA

SEQ ID NO: 211902 - DNA, 80 bp, synthetic construct; identical to SEQ ID NO: 27172
  source 1..80: mol_type = other DNA

SEQ ID NO: 211903 - DNA, 80 bp, synthetic construct; identical to SEQ ID NO: 27173
  source 1..80: mol_type = other DNA

SEQ ID NO: 211904 - DNA, 80 bp, synthetic construct; identical to SEQ ID NO: 27174
  source 1..80: mol_type = other DNA

SEQ ID NO: 211905 - DNA, 80 bp, synthetic construct; identical to SEQ ID NO: 27175
  source 1..80: mol_type = other DNA

SEQ ID NO: 211906 - DNA, 80 bp, synthetic construct; identical to SEQ ID NO: 27176
  source 1..80: mol_type = other DNA

SEQ ID NO: 211907 - DNA, 80 bp, synthetic construct; identical to SEQ ID NO: 27177
  source 1..80: mol_type = other DNA

SEQ ID NO: 211908 - DNA, 80 bp, synthetic construct; identical to SEQ ID NO: 27178
  source 1..80: mol_type = other DNA

SEQ ID NO: 211909 - DNA, 80 bp, synthetic construct; identical to SEQ ID NO: 27179
  source 1..80: mol_type = other DNA

SEQ ID NO: 211910 - DNA, 80 bp, synthetic construct; identical to SEQ ID NO: 27180
  source 1..80: mol_type = other DNA

SEQ ID NO: 211911 - DNA, 80 bp, synthetic construct; identical to SEQ ID NO: 27181
  source 1..80: mol_type = other DNA

SEQ ID NO: 211912 - DNA, 80 bp, synthetic construct; identical to SEQ ID NO: 27182
  source 1..80: mol_type = other DNA

SEQ ID NO: 211913 - DNA, 80 bp, synthetic construct; identical to SEQ ID NO: 27183
  source 1..80: mol_type = other DNA

SEQ ID NO: 211914 - DNA, 80 bp, synthetic construct; identical to SEQ ID NO: 27184
  source 1..80: mol_type = other DNA

SEQ ID NO: 211915 - DNA, 80 bp, synthetic construct; identical to SEQ ID NO: 27185
  source 1..80: mol_type = other DNA

SEQ ID NO: 211916 - DNA, 80 bp, synthetic construct; identical to SEQ ID NO: 27186
  source 1..80: mol_type = other DNA

SEQ ID NO: 211917 - DNA, 80 bp, synthetic construct; identical to SEQ ID NO: 27187
  source 1..80: mol_type = other DNA

SEQ ID NO: 211918 - DNA, 80 bp, synthetic construct; identical to SEQ ID NO: 27188
  source 1..80: mol_type = other DNA

SEQ ID NO: 211919 - DNA, 80 bp, synthetic construct; identical to SEQ ID NO: 27189
  source 1..80: mol_type = other DNA

SEQ ID NO: 211920 - DNA, 80 bp, synthetic construct; identical to SEQ ID NO: 27190
  source 1..80: mol_type = other DNA

SEQ ID NO: 211921 - DNA, 80 bp, synthetic construct; identical to SEQ ID NO: 27191
  source 1..80: mol_type = other DNA

SEQ ID NO: 211922 - DNA, 80 bp, synthetic construct; identical to SEQ ID NO: 27192
  source 1..80: mol_type = other DNA

SEQ ID NO: 211923 - DNA, 80 bp, synthetic construct; identical to SEQ ID NO: 27193
  source 1..80: mol_type = other DNA

SEQ ID NO: 211924 - DNA, 80 bp, synthetic construct; identical to SEQ ID NO: 27194
  source 1..80: mol_type = other DNA

SEQ ID NO: 211925 - DNA, 80 bp, synthetic construct; identical to SEQ ID NO: 27195
  source 1..80: mol_type = other DNA

SEQ ID NO: 211926 - DNA, 80 bp, synthetic construct; identical to SEQ ID NO: 27196
  source 1..80: mol_type = other DNA

SEQ ID NO: 211927 - DNA, 80 bp, synthetic construct; identical to SEQ ID NO: 27197
  source 1..80: mol_type = other DNA

SEQ ID NO: 211928 - DNA, 80 bp, synthetic construct; identical to SEQ ID NO: 27198
  source 1..80: mol_type = other DNA

SEQ ID NO: 211929 - DNA, 80 bp, synthetic construct; identical to SEQ ID NO: 27199
  source 1..80: mol_type = other DNA

SEQ ID NO: 211930 - DNA, 80 bp, synthetic construct; identical to SEQ ID NO: 27200
  source 1..80: mol_type = other DNA

SEQ ID NO: 211931 - DNA, 80 bp, synthetic construct; identical to SEQ ID NO: 27201
  source 1..80: mol_type = other DNA

SEQ ID NO: 211932 - DNA, 80 bp, synthetic construct; identical to SEQ ID NO: 27202
  source 1..80: mol_type = other DNA

SEQ ID NO: 211933 - DNA, 80 bp, synthetic construct; identical to SEQ ID NO: 27203
  source 1..80: mol_type = other DNA

SEQ ID NO: 211934 - DNA, 80 bp, synthetic construct; identical to SEQ ID NO: 27204
  source 1..80: mol_type = other DNA

SEQ ID NO: 211935 - DNA, 80 bp, synthetic construct; identical to SEQ ID NO: 27205
  source 1..80: mol_type = other DNA

SEQ ID NO: 211936 - DNA, 80 bp, synthetic construct; identical to SEQ ID NO: 27206
  source 1..80: mol_type = other DNA

SEQ ID NO: 211937 - DNA, 80 bp, synthetic construct; identical to SEQ ID NO: 27207
  source 1..80: mol_type = other DNA

SEQ ID NO: 211938 - DNA, 80 bp, synthetic construct; identical to SEQ ID NO: 27208
  source 1..80: mol_type = other DNA

SEQ ID NO: 211939 - DNA, 80 bp, synthetic construct; identical to SEQ ID NO: 27209
  source 1..80: mol_type = other DNA

SEQ ID NO: 211940 - DNA, 80 bp, synthetic construct; identical to SEQ ID NO: 27210
  source 1..80: mol_type = other DNA

SEQ ID NO: 211941 - DNA, 80 bp, synthetic construct; identical to SEQ ID NO: 27211
  source 1..80: mol_type = other DNA

SEQ ID NO: 211942 - DNA, 80 bp, synthetic construct; identical to SEQ ID NO: 27212
  source 1..80: mol_type = other DNA

SEQ ID NO: 211943 - DNA, 80 bp, synthetic construct; identical to SEQ ID NO: 27213
  source 1..80: mol_type = other DNA

SEQ ID NO: 211944 - DNA, 80 bp, synthetic construct; identical to SEQ ID NO: 27214
  source 1..80: mol_type = other DNA

SEQ ID NO: 211945 - DNA, 80 bp, synthetic construct; identical to SEQ ID NO: 27215
  source 1..80: mol_type = other DNA

SEQ ID NO: 211946 - DNA, 80 bp, synthetic construct; identical to SEQ ID NO: 27216
  source 1..80: mol_type = other DNA

SEQ ID NO: 211947 - DNA, 80 bp, synthetic construct; identical to SEQ ID NO: 27217
  source 1..80: mol_type = other DNA

SEQ ID NO: 211948 - DNA, 80 bp, synthetic construct; identical to SEQ ID NO: 27218
  source 1..80: mol_type = other DNA

SEQ ID NO: 211949 - DNA, 80 bp, synthetic construct; identical to SEQ ID NO: 27219
  source 1..80: mol_type = other DNA

SEQ ID NO: 211950 - DNA, 80 bp, synthetic construct; identical to SEQ ID NO: 27220
  source 1..80: mol_type = other DNA

SEQ ID NO: 211951 - DNA, 80 bp, synthetic construct; identical to SEQ ID NO: 27221
  source 1..80: mol_type = other DNA

SEQ ID NO: 211952 - DNA, 80 bp, synthetic construct; identical to SEQ ID NO: 27222
  source 1..80: mol_type = other DNA

SEQ ID NO: 211953 - DNA, 80 bp, synthetic construct; identical to SEQ ID NO: 27223
  source 1..80: mol_type = other DNA

SEQ ID NO: 211954 - DNA, 80 bp, synthetic construct; identical to SEQ ID NO: 27224
  source 1..80: mol_type = other DNA

SEQ ID NO: 211955 - DNA, 80 bp, synthetic construct; identical to SEQ ID NO: 27225
  source 1..80: mol_type = other DNA

SEQ ID NO: 211956 - DNA, 80 bp, synthetic construct; identical to SEQ ID NO: 27226
  source 1..80: mol_type = other DNA

SEQ ID NO: 211957 - DNA, 80 bp, synthetic construct; identical to SEQ ID NO: 27227
  source 1..80: mol_type = other DNA

SEQ ID NO: 211958 - DNA, 80 bp, synthetic construct; identical to SEQ ID NO: 27228
  source 1..80: mol_type = other DNA

SEQ ID NO: 211959 - DNA, 80 bp, synthetic construct; identical to SEQ ID NO: 27229
  source 1..80: mol_type = other DNA

SEQ ID NO: 211960 - DNA, 80 bp, synthetic construct; identical to SEQ ID NO: 27230
  source 1..80: mol_type = other DNA

SEQ ID NO: 211961 - DNA, 80 bp, synthetic construct; identical to SEQ ID NO: 27231
  source 1..80: mol_type = other DNA

SEQ ID NO: 211962 - DNA, 80 bp, synthetic construct; identical to SEQ ID NO: 27232
  source 1..80: mol_type = other DNA

SEQ ID NO: 211963 - DNA, 80 bp, synthetic construct; identical to SEQ ID NO: 27233
  source 1..80: mol_type = other DNA

SEQ ID NO: 211964 - DNA, 80 bp, synthetic construct; identical to SEQ ID NO: 27234
  source 1..80: mol_type = other DNA

SEQ ID NO: 211965 - DNA, 80 bp, synthetic construct; identical to SEQ ID NO: 27235
  source 1..80: mol_type = other DNA

SEQ ID NO: 211966 - DNA, 80 bp, synthetic construct; identical to SEQ ID NO: 27236
  source 1..80: mol_type = other DNA

SEQ ID NO: 211967 - DNA, 80 bp, synthetic construct; identical to SEQ ID NO: 27237
  source 1..80: mol_type = other DNA

SEQ ID NO: 211968 - DNA, 80 bp, synthetic construct; identical to SEQ ID NO: 27238
  source 1..80: mol_type = other DNA

SEQ ID NO: 211969 - DNA, 80 bp, synthetic construct; identical to SEQ ID NO: 27239
  source 1..80: mol_type = other DNA

SEQ ID NO: 211970 - DNA, 80 bp, synthetic construct; identical to SEQ ID NO: 27240
  source 1..80: mol_type = other DNA

SEQ ID NO: 211971 - DNA, 80 bp, synthetic construct; identical to SEQ ID NO: 27241
  source 1..80: mol_type = other DNA

SEQ ID NO: 211972 - DNA, 80 bp, synthetic construct; identical to SEQ ID NO: 27242
  source 1..80: mol_type = other DNA

SEQ ID NO: 211973 - DNA, 80 bp, synthetic construct; identical to SEQ ID NO: 27243
  source 1..80: mol_type = other DNA

SEQ ID NO: 211974 - DNA, 80 bp, synthetic construct; identical to SEQ ID NO: 27244
  source 1..80: mol_type = other DNA

SEQ ID NO: 211975 - DNA, 80 bp, synthetic construct; identical to SEQ ID NO: 27245
  source 1..80: mol_type = other DNA

SEQ ID NO: 211976 - DNA, 80 bp, synthetic construct; identical to SEQ ID NO: 27246
  source 1..80: mol_type = other DNA

SEQ ID NO: 211977 - DNA, 80 bp, synthetic construct; identical to SEQ ID NO: 27247
  source 1..80: mol_type = other DNA

SEQ ID NO: 211978 - DNA, 80 bp, synthetic construct; identical to SEQ ID NO: 27248
  source 1..80: mol_type = other DNA

SEQ ID NO: 211979 - DNA, 80 bp, synthetic construct; identical to SEQ ID NO: 27249
  source 1..80: mol_type = other DNA

SEQ ID NO: 211980 - DNA, 80 bp, synthetic construct; identical to SEQ ID NO: 27250
  source 1..80: mol_type = other DNA

SEQ ID NO: 211981 - DNA, 80 bp, synthetic construct; identical to SEQ ID NO: 27251
  source 1..80: mol_type = other DNA

SEQ ID NO: 211982 - DNA, 80 bp, synthetic construct; identical to SEQ ID NO: 27252
  source 1..80: mol_type = other DNA

SEQ ID NO: 211983 - DNA, 80 bp, synthetic construct; identical to SEQ ID NO: 27253
  source 1..80: mol_type = other DNA

SEQ ID NO: 211984 - DNA, 80 bp, synthetic construct; identical to SEQ ID NO: 27254
  source 1..80: mol_type = other DNA

SEQ ID NO: 211985 - DNA, 80 bp, synthetic construct; identical to SEQ ID NO: 27255
  source 1..80: mol_type = other DNA

SEQ ID NO: 211986 - DNA, 80 bp, synthetic construct; identical to SEQ ID NO: 27256
  source 1..80: mol_type = other DNA

SEQ ID NO: 211987 - DNA, 80 bp, synthetic construct; identical to SEQ ID NO: 27257
  source 1..80: mol_type = other DNA

SEQ ID NO: 211988 - DNA, 80 bp, synthetic construct; identical to SEQ ID NO: 27258
  source 1..80: mol_type = other DNA

SEQ ID NO: 211989 - DNA, 80 bp, synthetic construct; identical to SEQ ID NO: 27259
  source 1..80: mol_type = other DNA

SEQ ID NO: 211990 - DNA, 80 bp, synthetic construct; identical to SEQ ID NO: 27260
  source 1..80: mol_type = other DNA

SEQ ID NO: 211991 - DNA, 80 bp, synthetic construct; identical to SEQ ID NO: 27261
  source 1..80: mol_type = other DNA

SEQ ID NO: 211992 - DNA, 80 bp, synthetic construct; identical to SEQ ID NO: 27262
  source 1..80: mol_type = other DNA

SEQ ID NO: 211993 - DNA, 80 bp, synthetic construct; identical to SEQ ID NO: 27263
  source 1..80: mol_type = other DNA

SEQ ID NO: 211994 - DNA, 80 bp, synthetic construct; identical to SEQ ID NO: 27264
  source 1..80: mol_type = other DNA

SEQ ID NO: 211995 - DNA, 80 bp, synthetic construct; identical to SEQ ID NO: 27265
  source 1..80: mol_type = other DNA

SEQ ID NO: 211996 - DNA, 80 bp, synthetic construct; identical to SEQ ID NO: 27266
  source 1..80: mol_type = other DNA

SEQ ID NO: 211997 - DNA, 80 bp, synthetic construct; identical to SEQ ID NO: 27267
  source 1..80: mol_type = other DNA

SEQ ID NO: 211998 - DNA, 80 bp, synthetic construct; identical to SEQ ID NO: 27268
  source 1..80: mol_type = other DNA

SEQ ID NO: 211999 - DNA, 80 bp, synthetic construct; identical to SEQ ID NO: 27269
  source 1..80: mol_type = other DNA

SEQ ID NO: 212000 - DNA, 80 bp, synthetic construct; identical to SEQ ID NO: 27270
  source 1..80: mol_type = other DNA

SEQ ID NO: 212001 - DNA, 80 bp, synthetic construct; identical to SEQ ID NO: 27271
  source 1..80: mol_type = other DNA

SEQ ID NO: 212002 - DNA, 80 bp, synthetic construct; identical to SEQ ID NO: 27272
  source 1..80: mol_type = other DNA

SEQ ID NO: 212003 - DNA, 80 bp, synthetic construct; identical to SEQ ID NO: 27273
  source 1..80: mol_type = other DNA

SEQ ID NO: 212004 - DNA, 80 bp, synthetic construct; identical to SEQ ID NO: 27274
  source 1..80: mol_type = other DNA

SEQ ID NO: 212005 - DNA, 80 bp, synthetic construct; identical to SEQ ID NO: 27275
  source 1..80: mol_type = other DNA

SEQ ID NO: 212006 - DNA, 80 bp, synthetic construct; identical to SEQ ID NO: 27276
  source 1..80: mol_type = other DNA

SEQ ID NO: 212007 - DNA, 80 bp, synthetic construct; identical to SEQ ID NO: 27277
  source 1..80: mol_type = other DNA

SEQ ID NO: 212008 - DNA, 80 bp, synthetic construct; identical to SEQ ID NO: 27278
  source 1..80: mol_type = other DNA

SEQ ID NO: 212009 - DNA, 80 bp, synthetic construct; identical to SEQ ID NO: 27279
  source 1..80: mol_type = other DNA

SEQ ID NO: 212010 - DNA, 80 bp, synthetic construct; identical to SEQ ID NO: 27280
  source 1..80: mol_type = other DNA

SEQ ID NO: 212011 - DNA, 80 bp, synthetic construct; identical to SEQ ID NO: 27281
  source 1..80: mol_type = other DNA

SEQ ID NO: 212012 - DNA, 80 bp, synthetic construct; identical to SEQ ID NO: 27282
  source 1..80: mol_type = other DNA

SEQ ID NO: 212013 - DNA, 80 bp, synthetic construct; identical to SEQ ID NO: 27283
  source 1..80: mol_type = other DNA

SEQ ID NO: 212014 - DNA, 80 bp, synthetic construct; identical to SEQ ID NO: 27284
  source 1..80: mol_type = other DNA

SEQ ID NO: 212015 - DNA, 80 bp, synthetic construct; identical to SEQ ID NO: 27285
  source 1..80: mol_type = other DNA

SEQ ID NO: 212016 - DNA, 80 bp, synthetic construct; identical to SEQ ID NO: 27286
  source 1..80: mol_type = other DNA

SEQ ID NO: 212017 - DNA, 80 bp, synthetic construct; identical to SEQ ID NO: 27287
  source 1..80: mol_type = other DNA

SEQ ID NO: 212018 - DNA, 80 bp, synthetic construct; identical to SEQ ID NO: 27288
  source 1..80: mol_type = other DNA

SEQ ID NO: 212019 - DNA, 80 bp, synthetic construct; identical to SEQ ID NO: 27289
  source 1..80: mol_type = other DNA

SEQ ID NO: 212020 - DNA, 80 bp, synthetic construct; identical to SEQ ID NO: 27290
  source 1..80: mol_type = other DNA

SEQ ID NO: 212021 - DNA, 80 bp, synthetic construct; identical to SEQ ID NO: 27291
  source 1..80: mol_type = other DNA

SEQ ID NO: 212022 - DNA, 80 bp, synthetic construct; identical to SEQ ID NO: 27292
  source 1..80: mol_type = other DNA

SEQ ID NO: 212023 - DNA, 80 bp, synthetic construct; identical to SEQ ID NO: 27293
  source 1..80: mol_type = other DNA

SEQ ID NO: 212024 - DNA, 80 bp, synthetic construct; identical to SEQ ID NO: 27294
  source 1..80: mol_type = other DNA

SEQ ID NO: 212025 - DNA, 80 bp, synthetic construct; identical to SEQ ID NO: 27295
  source 1..80: mol_type = other DNA

SEQ ID NO: 212026 - DNA, 80 bp, synthetic construct; identical to SEQ ID NO: 27296
  source 1..80: mol_type = other DNA

SEQ ID NO: 212027 - DNA, 80 bp, synthetic construct; identical to SEQ ID NO: 27297
  source 1..80: mol_type = other DNA

SEQ ID NO: 212028 - DNA, 80 bp, synthetic construct; identical to SEQ ID NO: 27298
  source 1..80: mol_type = other DNA

SEQ ID NO: 212029 - DNA, 80 bp, synthetic construct; identical to SEQ ID NO: 27299
  source 1..80: mol_type = other DNA

SEQ ID NO: 212030 - DNA, 80 bp, synthetic construct; identical to SEQ ID NO: 27300
  source 1..80: mol_type = other DNA

SEQ ID NO: 212031 - DNA, 80 bp, synthetic construct; identical to SEQ ID NO: 27301
  source 1..80: mol_type = other DNA

SEQ ID NO: 212032 - DNA, 80 bp, synthetic construct; identical to SEQ ID NO: 27302
  source 1..80: mol_type = other DNA

SEQ ID NO: 212033 - DNA, 80 bp, synthetic construct; identical to SEQ ID NO: 27303
  source 1..80: mol_type = other DNA

SEQ ID NO: 212034 - DNA, 80 bp, synthetic construct; identical to SEQ ID NO: 27304
  source 1..80: mol_type = other DNA

SEQ ID NO: 212035 - DNA, 80 bp, synthetic construct; identical to SEQ ID NO: 27305
  source 1..80: mol_type = other DNA

SEQ ID NO: 212036 - DNA, 80 bp, synthetic construct; identical to SEQ ID NO: 27306
  source 1..80: mol_type = other DNA

SEQ ID NO: 212037 - DNA, 80 bp, synthetic construct; identical to SEQ ID NO: 27307
  source 1..80: mol_type = other DNA

SEQ ID NO: 212038 - DNA, 80 bp, synthetic construct; identical to SEQ ID NO: 27308
  source 1..80: mol_type = other DNA

SEQ ID NO: 212039 - DNA, 80 bp, synthetic construct; identical to SEQ ID NO: 27309
  source 1..80: mol_type = other DNA

SEQ ID NO: 212040 - DNA, 80 bp, synthetic construct; identical to SEQ ID NO: 27310
  source 1..80: mol_type = other DNA

SEQ ID NO: 212041 - DNA, 80 bp, synthetic construct; identical to SEQ ID NO: 27311
  source 1..80: mol_type = other DNA

SEQ ID NO: 212042 - DNA, 80 bp, synthetic construct; identical to SEQ ID NO: 27312
  source 1..80: mol_type = other DNA

SEQ ID NO: 212043 - DNA, 80 bp, synthetic construct; identical to SEQ ID NO: 27313
  source 1..80: mol_type = other DNA

SEQ ID NO: 212044 - DNA, 80 bp, synthetic construct; identical to SEQ ID NO: 27314
  source 1..80: mol_type = other DNA

SEQ ID NO: 212045 - DNA, 80 bp, synthetic construct; identical to SEQ ID NO: 27315
  source 1..80: mol_type = other DNA

SEQ ID NO: 212046 - DNA, 80 bp, synthetic construct; identical to SEQ ID NO: 27316
  source 1..80: mol_type = other DNA

SEQ ID NO: 212047 - DNA, 80 bp, synthetic construct; identical to SEQ ID NO: 27317
  source 1..80: mol_type = other DNA

SEQ ID NO: 212048 - DNA, 80 bp, synthetic construct; identical to SEQ ID NO: 27318
  source 1..80: mol_type = other DNA

SEQ ID NO: 212049 - DNA, 80 bp, synthetic construct; identical to SEQ ID NO: 27319
  source 1..80: mol_type = other DNA

SEQ ID NO: 212050 - DNA, 80 bp, synthetic construct; identical to SEQ ID NO: 27320
  source 1..80: mol_type = other DNA

SEQ ID NO: 212051 - DNA, 80 bp, synthetic construct; identical to SEQ ID NO: 27321
  source 1..80: mol_type = other DNA

SEQ ID NO: 212052 - DNA, 80 bp, synthetic construct; identical to SEQ ID NO: 27322
  source 1..80: mol_type = other DNA

SEQ ID NO: 212053 - DNA, 80 bp, synthetic construct; identical to SEQ ID NO: 27323
  source 1..80: mol_type = other DNA

SEQ ID NO: 212054 - DNA, 80 bp, synthetic construct; identical to SEQ ID NO: 27324
  source 1..80: mol_type = other DNA

SEQ ID NO: 212055 - DNA, 80 bp, synthetic construct; identical to SEQ ID NO: 27325
  source 1..80: mol_type = other DNA

SEQ ID NO: 212056 - DNA, 80 bp, synthetic construct; identical to SEQ ID NO: 27326
  source 1..80: mol_type = other DNA

SEQ ID NO: 212057 - DNA, 80 bp, synthetic construct; identical to SEQ ID NO: 27327
  source 1..80: mol_type = other DNA

SEQ ID NO: 212058 - DNA, 80 bp, synthetic construct; identical to SEQ ID NO: 27328
  source 1..80: mol_type = other DNA

SEQ ID NO: 212059 - DNA, 80 bp, synthetic construct; identical to SEQ ID NO: 27329
  source 1..80: mol_type = other DNA

SEQ ID NO: 212060 - DNA, 80 bp, synthetic construct; identical to SEQ ID NO: 27330
  source 1..80: mol_type = other DNA

SEQ ID NO: 212061 - DNA, 80 bp, synthetic construct; identical to SEQ ID NO: 27331
  source 1..80: mol_type = other DNA

SEQ ID NO: 212062 - DNA, 80 bp, synthetic construct; identical to SEQ ID NO: 27332
  source 1..80: mol_type = other DNA

SEQ ID NO: 212063 - DNA, 80 bp, synthetic construct; identical to SEQ ID NO: 27333
  source 1..80: mol_type = other DNA

SEQ ID NO: 212064 - DNA, 80 bp, synthetic construct; identical to SEQ ID NO: 27334
  source 1..80: mol_type = other DNA

SEQ ID NO: 212065 - DNA, 80 bp, synthetic construct; identical to SEQ ID NO: 27335
  source 1..80: mol_type = other DNA

SEQ ID NO: 212066 - DNA, 80 bp, synthetic construct; identical to SEQ ID NO: 27336
  source 1..80: mol_type = other DNA

SEQ ID NO: 212067 - DNA, 80 bp, synthetic construct; identical to SEQ ID NO: 27337
  source 1..80: mol_type = other DNA

SEQ ID NO: 212068 - DNA, 80 bp, synthetic construct; identical to SEQ ID NO: 27338
  source 1..80: mol_type = other DNA

SEQ ID NO: 212069 - DNA, 80 bp, synthetic construct; identical to SEQ ID NO: 27339
  source 1..80: mol_type = other DNA

SEQ ID NO: 212070 - DNA, 80 bp, synthetic construct; identical to SEQ ID NO: 27340
  source 1..80: mol_type = other DNA

SEQ ID NO: 212071 - DNA, 80 bp, synthetic construct; identical to SEQ ID NO: 27341
  source 1..80: mol_type = other DNA

SEQ ID NO: 212072 - DNA, 80 bp, synthetic construct; identical to SEQ ID NO: 27342
  source 1..80: mol_type = other DNA

SEQ ID NO: 212073 - DNA, 80 bp, synthetic construct; identical to SEQ ID NO: 27343
  source 1..80: mol_type = other DNA

SEQ ID NO: 212074 - DNA, 80 bp, synthetic construct; identical to SEQ ID NO: 27344
  source 1..80: mol_type = other DNA

SEQ ID NO: 212075 - DNA, 80 bp, synthetic construct; identical to SEQ ID NO: 27345
  source 1..80: mol_type = other DNA

SEQ ID NO: 212076 - DNA, 80 bp, synthetic construct; identical to SEQ ID NO: 27346
  source 1..80: mol_type = other DNA

SEQ ID NO: 212077 - DNA, 80 bp, synthetic construct; identical to SEQ ID NO: 27347
  source 1..80: mol_type = other DNA

SEQ ID NO: 212078 - DNA, 80 bp, synthetic construct; identical to SEQ ID NO: 27348
  source 1..80: mol_type = other DNA

SEQ ID NO: 212079 - DNA, 80 bp, synthetic construct; identical to SEQ ID NO: 27349
  source 1..80: mol_type = other DNA

SEQ ID NO: 212080 - DNA, 80 bp, synthetic construct; identical to SEQ ID NO: 27350
  source 1..80: mol_type = other DNA

SEQ ID NO: 212081 - DNA, 80 bp, synthetic construct; identical to SEQ ID NO: 27351
  source 1..80: mol_type = other DNA

SEQ ID NO: 212082 - DNA, 80 bp, synthetic construct; identical to SEQ ID NO: 27352
  source 1..80: mol_type = other DNA

SEQ ID NO: 212083 - DNA, 80 bp, synthetic construct; identical to SEQ ID NO: 27353
  source 1..80: mol_type = other DNA

SEQ ID NO: 212084 - DNA, 80 bp, synthetic construct; identical to SEQ ID NO: 27354
  source 1..80: mol_type = other DNA

SEQ ID NO: 212085 - DNA, 80 bp, synthetic construct; identical to SEQ ID NO: 27355
  source 1..80: mol_type = other DNA

SEQ ID NO: 212086 - DNA, 80 bp, synthetic construct; identical to SEQ ID NO: 27356
  source 1..80: mol_type = other DNA

SEQ ID NO: 212087 - DNA, 80 bp, synthetic construct; identical to SEQ ID NO: 27357
  source 1..80: mol_type = other DNA

SEQ ID NO: 212088 - DNA, 80 bp, synthetic construct; identical to SEQ ID NO: 27358
  source 1..80: mol_type = other DNA

SEQ ID NO: 212089 - DNA, 80 bp, synthetic construct; identical to SEQ ID NO: 27359
  source 1..80: mol_type = other DNA

SEQ ID NO: 212090 - DNA, 80 bp, synthetic construct; identical to SEQ ID NO: 27360
  source 1..80: mol_type = other DNA

SEQ ID NO: 212091 - DNA, 80 bp, synthetic construct; identical to SEQ ID NO: 27361
  source 1..80: mol_type = other DNA

SEQ ID NO: 212092 - DNA, 80 bp, synthetic construct; identical to SEQ ID NO: 27362
  source 1..80: mol_type = other DNA

SEQ ID NO: 212093 - DNA, 80 bp, synthetic construct; identical to SEQ ID NO: 27363
  source 1..80: mol_type = other DNA

SEQ ID NO: 212094 - DNA, 80 bp, synthetic construct; identical to SEQ ID NO: 27364
  source 1..80: mol_type = other DNA

SEQ ID NO: 212095 - DNA, 80 bp, synthetic construct; identical to SEQ ID NO: 27365
  source 1..80: mol_type = other DNA

SEQ ID NO: 212096 - DNA, 80 bp, synthetic construct; identical to SEQ ID NO: 27366
  source 1..80: mol_type = other DNA

SEQ ID NO: 212097 - DNA, 80 bp, synthetic construct; identical to SEQ ID NO: 27367
  source 1..80: mol_type = other DNA

SEQ ID NO: 212098 - DNA, 80 bp, synthetic construct; identical to SEQ ID NO: 27368
  source 1..80: mol_type = other DNA

SEQ ID NO: 212099 - DNA, 80 bp, synthetic construct; identical to SEQ ID NO: 27369
  source 1..80: mol_type = other DNA

SEQ ID NO: 212100 - DNA, 80 bp, synthetic construct; identical to SEQ ID NO: 27370
  source 1..80: mol_type = other DNA

SEQ ID NO: 212101 - DNA, 80 bp, synthetic construct; identical to SEQ ID NO: 27371
  source 1..80: mol_type = other DNA

SEQ ID NO: 212102 - DNA, 80 bp, synthetic construct; identical to SEQ ID NO: 27372
  source 1..80: mol_type = other DNA

SEQ ID NO: 212103 - DNA, 80 bp, synthetic construct; identical to SEQ ID NO: 27373
  source 1..80: mol_type = other DNA

SEQ ID NO: 212104 - DNA, 80 bp, synthetic construct; identical to SEQ ID NO: 27374
  source 1..80: mol_type = other DNA

SEQ ID NO: 212105 - DNA, 80 bp, synthetic construct; identical to SEQ ID NO: 27375
  source 1..80: mol_type = other DNA

SEQ ID NO: 212106 - DNA, 80 bp, synthetic construct; identical to SEQ ID NO: 27376
  source 1..80: mol_type = other DNA

SEQ ID NO: 212107 - DNA, 80 bp, synthetic construct; identical to SEQ ID NO: 27377
  source 1..80: mol_type = other DNA

SEQ ID NO: 212108 - DNA, 80 bp, synthetic construct; identical to SEQ ID NO: 27378
  source 1..80: mol_type = other DNA

SEQ ID NO: 212109 - DNA, 80 bp, synthetic construct; identical to SEQ ID NO: 27379
  source 1..80: mol_type = other DNA

SEQ ID NO: 212110 - DNA, 80 bp, synthetic construct; identical to SEQ ID NO: 27380
  source 1..80: mol_type = other DNA

SEQ ID NO: 212111 - DNA, 80 bp, synthetic construct; identical to SEQ ID NO: 27381
  source 1..80: mol_type = other DNA

SEQ ID NO: 212112 - DNA, 80 bp, synthetic construct; identical to SEQ ID NO: 27382
  source 1..80: mol_type = other DNA

SEQ ID NO: 212113 - DNA, 80 bp, synthetic construct; identical to SEQ ID NO: 27383
  source 1..80: mol_type = other DNA

SEQ ID NO: 212114 - DNA, 80 bp, synthetic construct; identical to SEQ ID NO: 27384
  source 1..80: mol_type = other DNA

SEQ ID NO: 212115 - DNA, 80 bp, synthetic construct; identical to SEQ ID NO: 27385
  source 1..80: mol_type = other DNA

SEQ ID NO: 212116 - DNA, 80 bp, synthetic construct; identical to SEQ ID NO: 27386
  source 1..80: mol_type = other DNA

SEQ ID NO: 212117 - DNA, 80 bp, synthetic construct; identical to SEQ ID NO: 27387
  source 1..80: mol_type = other DNA

SEQ ID NO: 212118 - DNA, 80 bp, synthetic construct; identical to SEQ ID NO: 27388
  source 1..80: mol_type = other DNA

SEQ ID NO: 212119 - DNA, 80 bp, synthetic construct; identical to SEQ ID NO: 27389
  source 1..80: mol_type = other DNA

SEQ ID NO: 212120 - DNA, 80 bp, synthetic construct; identical to SEQ ID NO: 27390
  source 1..80: mol_type = other DNA

SEQ ID NO: 212121 - DNA, 80 bp, synthetic construct; identical to SEQ ID NO: 27391
  source 1..80: mol_type = other DNA

SEQ ID NO: 212122 - DNA, 80 bp, synthetic construct; identical to SEQ ID NO: 27392
  source 1..80: mol_type = other DNA

SEQ ID NO: 212123 - DNA, 80 bp, synthetic construct; identical to SEQ ID NO: 27393
  source 1..80: mol_type = other DNA

SEQ ID NO: 212124 - DNA, 80 bp, synthetic construct; identical to SEQ ID NO: 27394
  source 1..80: mol_type = other DNA

SEQ ID NO: 212125 - DNA, 80 bp, synthetic construct; identical to SEQ ID NO: 27395
  source 1..80: mol_type = other DNA

SEQ ID NO: 212126 - DNA, 80 bp, synthetic construct; identical to SEQ ID NO: 27396
  source 1..80: mol_type = other DNA

SEQ ID NO: 212127 - DNA, 80 bp, synthetic construct; identical to SEQ ID NO: 27397
  source 1..80: mol_type = other DNA

SEQ ID NO: 212128 - DNA, 80 bp, synthetic construct; identical to SEQ ID NO: 27398
  source 1..80: mol_type = other DNA

SEQ ID NO: 212129 - DNA, 80 bp, synthetic construct; identical to SEQ ID NO: 27399
  source 1..80: mol_type = other DNA

SEQ ID NO: 212130 - DNA, 80 bp, synthetic construct; identical to SEQ ID NO: 27400
  source 1..80: mol_type = other DNA

SEQ ID NO: 212131 - DNA, 80 bp, synthetic construct; identical to SEQ ID NO: 27401
  source 1..80: mol_type = other DNA

SEQ ID NO: 212132 - DNA, 80 bp, synthetic construct; identical to SEQ ID NO: 27402
  source 1..80: mol_type = other DNA

SEQ ID NO: 212133 - DNA, 80 bp, synthetic construct; identical to SEQ ID NO: 27403
  source 1..80: mol_type = other DNA

SEQ ID NO: 212134 - DNA, 80 bp, synthetic construct; identical to SEQ ID NO: 27404
  source 1..80: mol_type = other DNA

SEQ ID NO: 212135 - DNA, 80 bp, synthetic construct; identical to SEQ ID NO: 27405
  source 1..80: mol_type = other DNA

SEQ ID NO: 212136 - DNA, 80 bp, synthetic construct; identical to SEQ ID NO: 27406
  source 1..80: mol_type = other DNA

SEQ ID NO: 212137 - DNA, 80 bp, synthetic construct; identical to SEQ ID NO: 27407
  source 1..80: mol_type = other DNA

SEQ ID NO: 212138 - DNA, 80 bp, synthetic construct; identical to SEQ ID NO: 27408
  source 1..80: mol_type = other DNA

SEQ ID NO: 212139 - DNA, 80 bp, synthetic construct; identical to SEQ ID NO: 27409
  source 1..80: mol_type = other DNA

SEQ ID NO: 212140 - DNA, 80 bp, synthetic construct; identical to SEQ ID NO: 27410
  source 1..80: mol_type = other DNA

SEQ ID NO: 212141 - DNA, 80 bp, synthetic construct; identical to SEQ ID NO: 27411
  source 1..80: mol_type = other DNA

SEQ ID NO: 212142 - DNA, 80 bp, synthetic construct; identical to SEQ ID NO: 27412
  source 1..80: mol_type = other DNA

SEQ ID NO: 212143 - DNA, 80 bp, synthetic construct; identical to SEQ ID NO: 27413
  source 1..80: mol_type = other DNA

SEQ ID NO: 212144 - DNA, 80 bp, synthetic construct; identical to SEQ ID NO: 27414
  source 1..80: mol_type = other DNA

SEQ ID NO: 212145 - DNA, 80 bp, synthetic construct; identical to SEQ ID NO: 27415
  source 1..80: mol_type = other DNA

SEQ ID NO: 212146 - DNA, 80 bp, synthetic construct; identical to SEQ ID NO: 27416
  source 1..80: mol_type = other DNA

SEQ ID NO: 212147 - DNA, 80 bp, synthetic construct; identical to SEQ ID NO: 27417
  source 1..80: mol_type = other DNA

SEQ ID NO: 212148 - DNA, 80 bp, synthetic construct; identical to SEQ ID NO: 27418
  source 1..80: mol_type = other DNA

SEQ ID NO: 212149 - DNA, 80 bp, synthetic construct; identical to SEQ ID NO: 27419
  source 1..80: mol_type = other DNA

SEQ ID NO: 212150 - DNA, 80 bp, synthetic construct; identical to SEQ ID NO: 27420
  source 1..80: mol_type = other DNA

SEQ ID NO: 212151 - DNA, 80 bp, synthetic construct; identical to SEQ ID NO: 27421
  source 1..80: mol_type = other DNA

SEQ ID NO: 212152 - DNA, 80 bp, synthetic construct; identical to SEQ ID NO: 27422
  source 1..80: mol_type = other DNA

SEQ ID NO: 212153 - DNA, 80 bp, synthetic construct; identical to SEQ ID NO: 27423
  source 1..80: mol_type = other DNA

SEQ ID NO: 212154 - DNA, 80 bp, synthetic construct; identical to SEQ ID NO: 27424
  source 1..80: mol_type = other DNA

SEQ ID NO: 212155 - DNA, 80 bp, synthetic construct; identical to SEQ ID NO: 27425
  source 1..80: mol_type = other DNA

SEQ ID NO: 212156 - DNA, 80 bp, synthetic construct; identical to SEQ ID NO: 27426
  source 1..80: mol_type = other DNA

SEQ ID NO: 212157 - DNA, 80 bp, synthetic construct; identical to SEQ ID NO: 27427
  source 1..80: mol_type = other DNA

SEQ ID NO: 212158 - DNA, 80 bp, synthetic construct; identical to SEQ ID NO: 27428
  source 1..80: mol_type = other DNA

SEQ ID NO: 212159 - DNA, 80 bp, synthetic construct; identical to SEQ ID NO: 27429
  source 1..80: mol_type = other DNA

SEQ ID NO: 212160 - DNA, 80 bp, synthetic construct; identical to SEQ ID NO: 27430
  source 1..80: mol_type = other DNA

SEQ ID NO: 212161 - DNA, 80 bp, synthetic construct; identical to SEQ ID NO: 27431
  source 1..80: mol_type = other DNA

SEQ ID NO: 212162 - DNA, 80 bp, synthetic construct; identical to SEQ ID NO: 27432
  source 1..80: mol_type = other DNA

SEQ ID NO: 212163 - DNA, 80 bp, synthetic construct; identical to SEQ ID NO: 27433
  source 1..80: mol_type = other DNA

SEQ ID NO: 212164 - DNA, 80 bp, synthetic construct; identical to SEQ ID NO: 27434
  source 1..80: mol_type = other DNA

SEQ ID NO: 212165 - DNA, 80 bp, synthetic construct; identical to SEQ ID NO: 27435
  source 1..80: mol_type = other DNA

SEQ ID NO: 212166 - DNA, 80 bp, synthetic construct; identical to SEQ ID NO: 27436
  source 1..80: mol_type = other DNA

SEQ ID NO: 212167 - DNA, 80 bp, synthetic construct; identical to SEQ ID NO: 27437
  source 1..80: mol_type = other DNA

SEQ ID NO: 212168 - DNA, 80 bp, synthetic construct; identical to SEQ ID NO: 27438
  source 1..80: mol_type = other DNA

SEQ ID NO: 212169 - DNA, 80 bp, synthetic construct; identical to SEQ ID NO: 27439
  source 1..80: mol_type = other DNA

SEQ ID NO: 212170 - DNA, 80 bp, synthetic construct; identical to SEQ ID NO: 27440
  source 1..80: mol_type = other DNA

SEQ ID NO: 212171 - DNA, 80 bp, synthetic construct; identical to SEQ ID NO: 27441
  source 1..80: mol_type = other DNA

SEQ ID NO: 212172 - DNA, 80 bp, synthetic construct; identical to SEQ ID NO: 27442
  source 1..80: mol_type = other DNA

SEQ ID NO: 212173 - DNA, 80 bp, synthetic construct; identical to SEQ ID NO: 27443
  source 1..80: mol_type = other DNA

SEQ ID NO: 212174 - DNA, 80 bp, synthetic construct; identical to SEQ ID NO: 27444
  source 1..80: mol_type = other DNA

SEQ ID NO: 212175 - DNA, 80 bp, synthetic construct; identical to SEQ ID NO: 27445
  source 1..80: mol_type = other DNA

SEQ ID NO: 212176 - DNA, 80 bp, synthetic construct; identical to SEQ ID NO: 27446
  source 1..80: mol_type = other DNA

SEQ ID NO: 212177 - DNA, 80 bp, synthetic construct; identical to SEQ ID NO: 27447
  source 1..80: mol_type = other DNA

SEQ ID NO: 212178 - DNA, 80 bp, synthetic construct; identical to SEQ ID NO: 27448
  source 1..80: mol_type = other DNA

SEQ ID NO: 212179 - DNA, 80 bp, synthetic construct; identical to SEQ ID NO: 27449
  source 1..80: mol_type = other DNA

SEQ ID NO: 212180 - DNA, 80 bp, synthetic construct; identical to SEQ ID NO: 27450
  source 1..80: mol_type = other DNA

SEQ ID NO: 212181 - DNA, 80 bp, synthetic construct; identical to SEQ ID NO: 27451
  source 1..80: mol_type = other DNA

SEQ ID NO: 212182 - DNA, 80 bp, synthetic construct; identical to SEQ ID NO: 27452
  source 1..80: mol_type = other DNA

SEQ ID NO: 212183 - DNA, 80 bp, synthetic construct; identical to SEQ ID NO: 27453
  source 1..80: mol_type = other DNA

SEQ ID NO: 212184 - DNA, 80 bp, synthetic construct; identical to SEQ ID NO: 27454
  source 1..80: mol_type = other DNA

SEQ ID NO: 212185 - DNA, 80 bp, synthetic construct; identical to SEQ ID NO: 27455
  source 1..80: mol_type = other DNA

SEQ ID NO: 212186 - DNA, 80 bp, synthetic construct; identical to SEQ ID NO: 27456
  source 1..80: mol_type = other DNA

SEQ ID NO: 212187 - DNA, 80 bp, synthetic construct; identical to SEQ ID NO: 27457
  source 1..80: mol_type = other DNA

SEQ ID NO: 212188 - DNA, 80 bp, synthetic construct; identical to SEQ ID NO: 27458
  source 1..80: mol_type = other DNA

SEQ ID NO: 212189 - DNA, 80 bp, synthetic construct; identical to SEQ ID NO: 27459
  source 1..80: mol_type = other DNA

SEQ ID NO: 212190 - DNA, 80 bp, synthetic construct; identical to SEQ ID NO: 27460
  source 1..80: mol_type = other DNA

SEQ ID NO: 212191 - DNA, 80 bp, synthetic construct; identical to SEQ ID NO: 27461
  source 1..80: mol_type = other DNA

SEQ ID NO: 212192 - DNA, 80 bp, synthetic construct; identical to SEQ ID NO: 27462
  source 1..80: mol_type = other DNA

SEQ ID NO: 212193 - DNA, 80 bp, synthetic construct; identical to SEQ ID NO: 27463
  source 1..80: mol_type = other DNA

SEQ ID NO: 212194 - DNA, 80 bp, synthetic construct; identical to SEQ ID NO: 27464
  source 1..80: mol_type = other DNA

SEQ ID NO: 212195 - DNA, 80 bp, synthetic construct; identical to SEQ ID NO: 27465
  source 1..80: mol_type = other DNA

SEQ ID NO: 212196 - DNA, 80 bp, synthetic construct; identical to SEQ ID NO: 27466
  source 1..80: mol_type = other DNA

SEQ ID NO: 212197 - DNA, 80 bp, synthetic construct; identical to SEQ ID NO: 27467
  source 1..80: mol_type = other DNA

SEQ ID NO: 212198 - DNA, 80 bp, synthetic construct; identical to SEQ ID NO: 27468
  source 1..80: mol_type = other DNA

SEQ ID NO: 212199 - DNA, 80 bp, synthetic construct; identical to SEQ ID NO: 27469
  source 1..80: mol_type = other DNA

SEQ ID NO: 212200 - DNA, 80 bp, synthetic construct; identical to SEQ ID NO: 27470
  source 1..80: mol_type = other DNA

SEQ ID NO: 212201 - DNA, 80 bp, synthetic construct; identical to SEQ ID NO: 27471
  source 1..80: mol_type = other DNA

SEQ ID NO: 212202 - DNA, 80 bp, synthetic construct; identical to SEQ ID NO: 27472
  source 1..80: mol_type = other DNA

SEQ ID NO: 212203 - DNA, 80 bp, synthetic construct; identical to SEQ ID NO: 27473
  source 1..80: mol_type = other DNA

SEQ ID NO: 212204 - DNA, 80 bp, synthetic construct; identical to SEQ ID NO: 27474
  source 1..80: mol_type = other DNA

SEQ ID NO: 212205 - DNA, 80 bp, synthetic construct; identical to SEQ ID NO: 27475
  source 1..80: mol_type = other DNA

SEQ ID NO: 212206 - DNA, 80 bp, synthetic construct; identical to SEQ ID NO: 27476
  source 1..80: mol_type = other DNA

SEQ ID NO: 212207 - DNA, 80 bp, synthetic construct; identical to SEQ ID NO: 27477
  source 1..80: mol_type = other DNA

SEQ ID NO: 212208 - DNA, 80 bp, synthetic construct; identical to SEQ ID NO: 27478
  source 1..80: mol_type = other DNA

SEQ ID NO: 212209 - DNA, 80 bp, synthetic construct; identical to SEQ ID NO: 27479
  source 1..80: mol_type = other DNA

SEQ ID NO: 212210 - DNA, 80 bp, synthetic construct; identical to SEQ ID NO: 27480
  source 1..80: mol_type = other DNA

SEQ ID NO: 212211 - DNA, 80 bp, synthetic construct; identical to SEQ ID NO: 27481
  source 1..80: mol_type = other DNA

SEQ ID NO: 212212 - DNA, 80 bp, synthetic construct; identical to SEQ ID NO: 27482
  source 1..80: mol_type = other DNA

SEQ ID NO: 212213 - DNA, 80 bp, synthetic construct; identical to SEQ ID NO: 27483
  source 1..80: mol_type = other DNA

SEQ ID NO: 212214 - DNA, 80 bp, synthetic construct; identical to SEQ ID NO: 27484
  source 1..80: mol_type = other DNA

SEQ ID NO: 212215 - DNA, 80 bp, synthetic construct; identical to SEQ ID NO: 27485
  source 1..80: mol_type = other DNA

SEQ ID NO: 212216 - DNA, 80 bp, synthetic construct; identical to SEQ ID NO: 27486
  source 1..80: mol_type = other DNA

SEQ ID NO: 212217 - DNA, 80 bp, synthetic construct; identical to SEQ ID NO: 27487
  source 1..80: mol_type = other DNA

SEQ ID NO: 212218 - DNA, 80 bp, synthetic construct; identical to SEQ ID NO: 27488
  source 1..80: mol_type = other DNA

SEQ ID NO: 212219 - DNA, 80 bp, synthetic construct; identical to SEQ ID NO: 27489
  source 1..80: mol_type = other DNA

SEQ ID NO: 212220 - DNA, 80 bp, synthetic construct; identical to SEQ ID NO: 27490
  source 1..80: mol_type = other DNA

SEQ ID NO: 212221 - DNA, 80 bp, synthetic construct; identical to SEQ ID NO: 27491
  source 1..80: mol_type = other DNA

SEQ ID NO: 212222 - DNA, 80 bp, synthetic construct; identical to SEQ ID NO: 27492
  source 1..80: mol_type = other DNA

SEQ ID NO: 212223 - DNA, 80 bp, synthetic construct; identical to SEQ ID NO: 27493
  source 1..80: mol_type = other DNA

SEQ ID NO: 212224 - DNA, 80 bp, synthetic construct; identical to SEQ ID NO: 27494
  source 1..80: mol_type = other DNA

SEQ ID NO: 212225 - DNA, 80 bp, synthetic construct; identical to SEQ ID NO: 27495
  source 1..80: mol_type = other DNA

SEQ ID NO: 212226 - DNA, 80 bp, synthetic construct; identical to SEQ ID NO: 27496
  source 1..80: mol_type = other DNA

SEQ ID NO: 212227 - DNA, 80 bp, synthetic construct; identical to SEQ ID NO: 27497
  source 1..80: mol_type = other DNA

SEQ ID NO: 212228 - DNA, 80 bp, synthetic construct; identical to SEQ ID NO: 27498
  source 1..80: mol_type = other DNA

SEQ ID NO: 212229 - DNA, 80 bp, synthetic construct; identical to SEQ ID NO: 27499
  source 1..80: mol_type = other DNA

SEQ ID NO: 212230 - DNA, 80 bp, synthetic construct; identical to SEQ ID NO: 27500
  source 1..80: mol_type = other DNA

SEQ ID NO: 212231 - DNA, 80 bp, synthetic construct; identical to SEQ ID NO: 27501
  source 1..80: mol_type = other DNA

SEQ ID NO: 212232 - DNA, 80 bp, synthetic construct; identical to SEQ ID NO: 27502
  source 1..80: mol_type = other DNA

SEQ ID NO: 212233 - DNA, 80 bp, synthetic construct; identical to SEQ ID NO: 27503
  source 1..80: mol_type = other DNA

SEQ ID NO: 212234 - DNA, 80 bp, synthetic construct; identical to SEQ ID NO: 27504
  source 1..80: mol_type = other DNA

SEQ ID NO: 212235 - DNA, 80 bp, synthetic construct; identical to SEQ ID NO: 27505
  source 1..80: mol_type = other DNA

SEQ ID NO: 212236 - DNA, 80 bp, synthetic construct; identical to SEQ ID NO: 27506
  source 1..80: mol_type = other DNA

SEQ ID NO: 212237 - DNA, 80 bp, synthetic construct; identical to SEQ ID NO: 27507
  source 1..80: mol_type = other DNA

SEQ ID NO: 212238 - DNA, 80 bp, synthetic construct; identical to SEQ ID NO: 27508
  source 1..80: mol_type = other DNA

SEQ ID NO: 212239 - DNA, 80 bp, synthetic construct; identical to SEQ ID NO: 27509
  source 1..80: mol_type = other DNA

SEQ ID NO: 212240 - DNA, 80 bp, synthetic construct; identical to SEQ ID NO: 27510
  source 1..80: mol_type = other DNA

SEQ ID NO: 212241 - DNA, 80 bp, synthetic construct; identical to SEQ ID NO: 27511
  source 1..80: mol_type = other DNA

SEQ ID NO: 212242 - DNA, 80 bp, synthetic construct; identical to SEQ ID NO: 27512
  source 1..80: mol_type = other DNA

SEQ ID NO: 212243 - DNA, 80 bp, synthetic construct; identical to SEQ ID NO: 27513
  source 1..80: mol_type = other DNA

SEQ ID NO: 212244 - DNA, 80 bp, synthetic construct; identical to SEQ ID NO: 27514
  source 1..80: mol_type = other DNA

SEQ ID NO: 212245 - DNA, 80 bp, synthetic construct; identical to SEQ ID NO: 27515
  source 1..80: mol_type = other DNA

SEQ ID NO: 212246 - DNA, 80 bp, synthetic construct; identical to SEQ ID NO: 27516
  source 1..80: mol_type = other DNA

SEQ ID NO: 212247 - DNA, 80 bp, synthetic construct; identical to SEQ ID NO: 27517
  source 1..80: mol_type = other DNA

SEQ ID NO: 212248 - DNA, 80 bp, synthetic construct; identical to SEQ ID NO: 27518
  source 1..80: mol_type = other DNA

SEQ ID NO: 212249 - DNA, 80 bp, synthetic construct; identical to SEQ ID NO: 27519
  source 1..80: mol_type = other DNA

SEQ ID NO: 212250 - DNA, 80 bp, synthetic construct; identical to SEQ ID NO: 27520
  source 1..80: mol_type = other DNA

SEQ ID NO: 212251 - DNA, 80 bp, synthetic construct; identical to SEQ ID NO: 27521
  source 1..80: mol_type = other DNA

SEQ ID NO: 212252 - DNA, 80 bp, synthetic construct; identical to SEQ ID NO: 27522
  source 1..80: mol_type = other DNA

SEQ ID NO: 212253 - DNA, 80 bp, synthetic construct; identical to SEQ ID NO: 27523
  source 1..80: mol_type = other DNA

SEQ ID NO: 212254 - DNA, 80 bp, synthetic construct; identical to SEQ ID NO: 27524
  source 1..80: mol_type = other DNA

SEQ ID NO: 212255 - DNA, 80 bp, synthetic construct; identical to SEQ ID NO: 27525
  source 1..80: mol_type = other DNA

SEQ ID NO: 212256 - DNA, 80 bp, synthetic construct; identical to SEQ ID NO: 27526
  source 1..80: mol_type = other DNA

SEQ ID NO: 212257 - DNA, 80 bp, synthetic construct; identical to SEQ ID NO: 27527
  source 1..80: mol_type = other DNA

SEQ ID NO: 212258 - DNA, 80 bp, synthetic construct; identical to SEQ ID NO: 27528
  source 1..80: mol_type = other DNA

SEQ ID NO: 212259 - DNA, 80 bp, synthetic construct; identical to SEQ ID NO: 27529
  source 1..80: mol_type = other DNA

SEQ ID NO: 212260 - DNA, 80 bp, synthetic construct; identical to SEQ ID NO: 27530
  source 1..80: mol_type = other DNA

SEQ ID NO: 212261 - DNA, 80 bp, synthetic construct; identical to SEQ ID NO: 27531
  source 1..80: mol_type = other DNA

SEQ ID NO: 212262 - DNA, 80 bp, synthetic construct; identical to SEQ ID NO: 27532
  source 1..80: mol_type = other DNA

SEQ ID NO: 212263 - DNA, 80 bp, synthetic construct; identical to SEQ ID NO: 27533
  source 1..80: mol_type = other DNA

SEQ ID NO: 212264 - DNA, 80 bp, synthetic construct; identical to SEQ ID NO: 27534
  source 1..80: mol_type = other DNA

SEQ ID NO: 212265 - DNA, 80 bp, synthetic construct; identical to SEQ ID NO: 27535
  source 1..80: mol_type = other DNA

SEQ ID NO: 212266 - DNA, 80 bp, synthetic construct; identical to SEQ ID NO: 27536
  source 1..80: mol_type = other DNA

SEQ ID NO: 212267 - DNA, 80 bp, synthetic construct; identical to SEQ ID NO: 27537
  source 1..80: mol_type = other DNA

SEQ ID NO: 212268 - DNA, 80 bp, synthetic construct; identical to SEQ ID NO: 27538
  source 1..80: mol_type = other DNA

SEQ ID NO: 212269 - DNA, 80 bp, synthetic construct; identical to SEQ ID NO: 27539
  source 1..80: mol_type = other DNA

SEQ ID NO: 212270 - DNA, 80 bp, synthetic construct; identical to SEQ ID NO: 27540
  source 1..80: mol_type = other DNA

SEQ ID NO: 212271 - DNA, 80 bp, synthetic construct; identical to SEQ ID NO: 27541
  source 1..80: mol_type = other DNA

SEQ ID NO: 212272 - DNA, 80 bp, synthetic construct; identical to SEQ ID NO: 27542
  source 1..80: mol_type = other DNA

SEQ ID NO: 212273 - DNA, 80 bp, synthetic construct; identical to SEQ ID NO: 27543
  source 1..80: mol_type = other DNA

SEQ ID NO: 212274 - DNA, 80 bp, synthetic construct; identical to SEQ ID NO: 27544
  source 1..80: mol_type = other DNA

SEQ ID NO: 212275 - DNA, 80 bp, synthetic construct; identical to SEQ ID NO: 27545
  source 1..80: mol_type = other DNA

SEQ ID NO: 212276 - DNA, 80 bp, synthetic construct; identical to SEQ ID NO: 27546
  source 1..80: mol_type = other DNA

SEQ ID NO: 212277 - DNA, 80 bp, synthetic construct; identical to SEQ ID NO: 27547
  source 1..80: mol_type = other DNA

SEQ ID NO: 212278 - DNA, 80 bp, synthetic construct; identical to SEQ ID NO: 27548
  source 1..80: mol_type = other DNA

SEQ ID NO: 212279 - DNA, 80 bp, synthetic construct; identical to SEQ ID NO: 27549
  source 1..80: mol_type = other DNA

SEQ ID NO: 212280 - DNA, 80 bp, synthetic construct; identical to SEQ ID NO: 27550
  source 1..80: mol_type = other DNA

SEQ ID NO: 212281 - DNA, 80 bp, synthetic construct; identical to SEQ ID NO: 27551
  source 1..80: mol_type = other DNA

SEQ ID NO: 212282 - DNA, 80 bp, synthetic construct; identical to SEQ ID NO: 27552
  source 1..80: mol_type = other DNA

SEQ ID NO: 212283 - DNA, 80 bp, synthetic construct; identical to SEQ ID NO: 27553
  source 1..80: mol_type = other DNA

SEQ ID NO: 212284 - DNA, 80 bp, synthetic construct; identical to SEQ ID NO: 27554
  source 1..80: mol_type = other DNA

SEQ ID NO: 212285 - DNA, 80 bp, synthetic construct; identical to SEQ ID NO: 27555
  source 1..80: mol_type = other DNA

SEQ ID NO: 212286 - DNA, 80 bp, synthetic construct; identical to SEQ ID NO: 27556
  source 1..80: mol_type = other DNA

SEQ ID NO: 212287 - DNA, 80 bp, synthetic construct; identical to SEQ ID NO: 27557
  source 1..80: mol_type = other DNA

SEQ ID NO: 212288 - DNA, 80 bp, synthetic construct; identical to SEQ ID NO: 27558
  source 1..80: mol_type = other DNA

SEQ ID NO: 212289 - DNA, 80 bp, synthetic construct; identical to SEQ ID NO: 27559
  source 1..80: mol_type = other DNA

SEQ ID NO: 212290 - DNA, 80 bp, synthetic construct; identical to SEQ ID NO: 27560
  source 1..80: mol_type = other DNA

SEQ ID NO: 212291 - DNA, 80 bp, synthetic construct; identical to SEQ ID NO: 27561
  source 1..80: mol_type = other DNA

SEQ ID NO: 212292 - DNA, 80 bp, synthetic construct; identical to SEQ ID NO: 27562
  source 1..80: mol_type = other DNA

SEQ ID NO: 212293 - DNA, 80 bp, synthetic construct; identical to SEQ ID NO: 27563
  source 1..80: mol_type = other DNA

SEQ ID NO: 212294 - DNA, 80 bp, synthetic construct; identical to SEQ ID NO: 27564
  source 1..80: mol_type = other DNA

SEQ ID NO: 212295 - DNA, 80 bp, synthetic construct; identical to SEQ ID NO: 27565
  source 1..80: mol_type = other DNA

SEQ ID NO: 212296 - DNA, 80 bp, synthetic construct; identical to SEQ ID NO: 27566
  source 1..80: mol_type = other DNA

SEQ ID NO: 212297 - DNA, 80 bp, synthetic construct; identical to SEQ ID NO: 27567
  source 1..80: mol_type = other DNA

SEQ ID NO: 212298 - DNA, 80 bp, synthetic construct; identical to SEQ ID NO: 27568
  source 1..80: mol_type = other DNA

SEQ ID NO: 212299 - DNA, 80 bp, synthetic construct; identical to SEQ ID NO: 27569
  source 1..80: mol_type = other DNA

SEQ ID NO: 212300 - DNA, 80 bp, synthetic construct; identical to SEQ ID NO: 27570
  source 1..80: mol_type = other DNA

SEQ ID NO: 212301 - DNA, 80 bp, synthetic construct; identical to SEQ ID NO: 27571
  source 1..80: mol_type = other DNA

SEQ ID NO: 212302 - DNA, 80 bp, synthetic construct; identical to SEQ ID NO: 27572
  source 1..80: mol_type = other DNA

SEQ ID NO: 212303 - DNA, 80 bp, synthetic construct; identical to SEQ ID NO: 27573
  source 1..80: mol_type = other DNA

SEQ ID NO: 212304 - DNA, 80 bp, synthetic construct; identical to SEQ ID NO: 27574
  source 1..80: mol_type = other DNA

SEQ ID NO: 212305 - DNA, 80 bp, synthetic construct; identical to SEQ ID NO: 27575
  source 1..80: mol_type = other DNA

SEQ ID NO: 212306 - DNA, 80 bp, synthetic construct; identical to SEQ ID NO: 27576
  source 1..80: mol_type = other DNA

SEQ ID NO: 212307 - DNA, 80 bp, synthetic construct; identical to SEQ ID NO: 27577
  source 1..80: mol_type = other DNA

SEQ ID NO: 212308 - DNA, 80 bp, synthetic construct; identical to SEQ ID NO: 27578
  source 1..80: mol_type = other DNA

SEQ ID NO: 212309 - DNA, 80 bp, synthetic construct; identical to SEQ ID NO: 27579
  source 1..80: mol_type = other DNA

SEQ ID NO: 212310 - DNA, 80 bp, synthetic construct; identical to SEQ ID NO: 27580
  source 1..80: mol_type = other DNA

SEQ ID NO: 212311 - DNA, 80 bp, synthetic construct; identical to SEQ ID NO: 27581
  source 1..80: mol_type = other DNA

SEQ ID NO: 212312 - DNA, 80 bp, synthetic construct; identical to SEQ ID NO: 27582
  source 1..80: mol_type = other DNA

SEQ ID NO: 212313 - DNA, 80 bp, synthetic construct; identical to SEQ ID NO: 27583
  source 1..80: mol_type = other DNA

SEQ ID NO: 212314 - DNA, 80 bp, synthetic construct; identical to SEQ ID NO: 27584
  source 1..80: mol_type = other DNA

SEQ ID NO: 212315 - DNA, 80 bp, synthetic construct; identical to SEQ ID NO: 27585
  source 1..80: mol_type = other DNA

SEQ ID NO: 212316 - DNA, 80 bp, synthetic construct; identical to SEQ ID NO: 27586
  source 1..80: mol_type = other DNA

SEQ ID NO: 212317 - DNA, 80 bp, synthetic construct; identical to SEQ ID NO: 27587
  source 1..80: mol_type = other DNA

SEQ ID NO: 212318 - DNA, 80 bp, synthetic construct; identical to SEQ ID NO: 27588
  source 1..80: mol_type = other DNA

SEQ ID NO: 212319 - DNA, 80 bp, synthetic construct; identical to SEQ ID NO: 27589
  source 1..80: mol_type = other DNA

SEQ ID NO: 212320 - DNA, 80 bp, synthetic construct; identical to SEQ ID NO: 27590
  source 1..80: mol_type = other DNA

SEQ ID NO: 212321 - DNA, 80 bp, synthetic construct; identical to SEQ ID NO: 27591
  source 1..80: mol_type = other DNA

SEQ ID NO: 212322 - DNA, 80 bp, synthetic construct; identical to SEQ ID NO: 27592
  source 1..80: mol_type = other DNA

SEQ ID NO: 212323 - DNA, 80 bp, synthetic construct; identical to SEQ ID NO: 27593
  source 1..80: mol_type = other DNA

SEQ ID NO: 212324 - DNA, 80 bp, synthetic construct; identical to SEQ ID NO: 27594
  source 1..80: mol_type = other DNA

SEQ ID NO: 212325 - DNA, 80 bp, synthetic construct; identical to SEQ ID NO: 27595
  source 1..80: mol_type = other DNA

SEQ ID NO: 212326 - DNA, 80 bp, synthetic construct; identical to SEQ ID NO: 27596
  source 1..80: mol_type = other DNA

SEQ ID NO: 212327 - DNA, 80 bp, synthetic construct; identical to SEQ ID NO: 27597
  source 1..80: mol_type = other DNA

SEQ ID NO: 212328 - DNA, 80 bp, synthetic construct; identical to SEQ ID NO: 27598
  source 1..80: mol_type = other DNA

SEQ ID NO: 212329 - DNA, 80 bp, synthetic construct; identical to SEQ ID NO: 27599
  source 1..80: mol_type = other DNA

SEQ ID NO: 212330 - DNA, 80 bp, synthetic construct; identical to SEQ ID NO: 27600
  source 1..80: mol_type = other DNA

SEQ ID NO: 212331 - DNA, 80 bp, synthetic construct; identical to SEQ ID NO: 27601
  source 1..80: mol_type = other DNA

SEQ ID NO: 212332 - DNA, 80 bp, synthetic construct; identical to SEQ ID NO: 27602
  source 1..80: mol_type = other DNA

SEQ ID NO: 212333 - DNA, 80 bp, synthetic construct; identical to SEQ ID NO: 27603
  source 1..80: mol_type = other DNA

SEQ ID NO: 212334 - DNA, 80 bp, synthetic construct; identical to SEQ ID NO: 27604
  source 1..80: mol_type = other DNA

SEQ ID NO: 212335 - DNA, 80 bp, synthetic construct; identical to SEQ ID NO: 27605
  source 1..80: mol_type = other DNA

SEQ ID NO: 212336 - DNA, 80 bp, synthetic construct; identical to SEQ ID NO: 27606
  source 1..80: mol_type = other DNA

SEQ ID NO: 212337 - DNA, 80 bp, synthetic construct; identical to SEQ ID NO: 27607
  source 1..80: mol_type = other DNA

SEQ ID NO: 212338 - DNA, 80 bp, synthetic construct; identical to SEQ ID NO: 27608
  source 1..80: mol_type = other DNA

SEQ ID NO: 212339 - DNA, 80 bp, synthetic construct; identical to SEQ ID NO: 27609
  source 1..80: mol_type = other DNA

SEQ ID NO: 212340 - DNA, 80 bp, synthetic construct; identical to SEQ ID NO: 27610
  source 1..80: mol_type = other DNA

SEQ ID NO: 212341 - DNA, 80 bp, synthetic construct; identical to SEQ ID NO: 27611
  source 1..80: mol_type = other DNA

SEQ ID NO: 212342 - DNA, 80 bp, synthetic construct; identical to SEQ ID NO: 27612
  source 1..80: mol_type = other DNA

SEQ ID NO: 212343 - DNA, 80 bp, synthetic construct; identical to SEQ ID NO: 27613
  source 1..80: mol_type = other DNA

SEQ ID NO: 212344 - DNA, 80 bp, synthetic construct; identical to SEQ ID NO: 27614
  source 1..80: mol_type = other DNA

SEQ ID NO: 212345 - DNA, 80 bp, synthetic construct; identical to SEQ ID NO: 27615
  source 1..80: mol_type = other DNA

SEQ ID NO: 212346 - DNA, 80 bp, synthetic construct; identical to SEQ ID NO: 27616
  source 1..80: mol_type = other DNA

SEQ ID NO: 212347 - DNA, 80 bp, synthetic construct; identical to SEQ ID NO: 27617
  source 1..80: mol_type = other DNA

SEQ ID NO: 212348 - DNA, 80 bp, synthetic construct; identical to SEQ ID NO: 27618
  source 1..80: mol_type = other DNA

SEQ ID NO: 212349 - DNA, 80 bp, synthetic construct; identical to SEQ ID NO: 27619
  source 1..80: mol_type = other DNA

SEQ ID NO: 212350 - DNA, 80 bp, synthetic construct; identical to SEQ ID NO: 27620
  source 1..80: mol_type = other DNA

SEQ ID NO: 212351 - DNA, 80 bp, synthetic construct; identical to SEQ ID NO: 27621
  source 1..80: mol_type = other DNA

SEQ ID NO: 212352 - DNA, 80 bp, synthetic construct; identical to SEQ ID NO: 27622
  source 1..80: mol_type = other DNA

SEQ ID NO: 212353 - DNA, 80 bp, synthetic construct; identical to SEQ ID NO: 27623
  source 1..80: mol_type = other DNA

SEQ ID NO: 212354 - DNA, 80 bp, synthetic construct; identical to SEQ ID NO: 27624
  source 1..80: mol_type = other DNA

SEQ ID NO: 212355 - DNA, 80 bp, synthetic construct; identical to SEQ ID NO: 27625
  source 1..80: mol_type = other DNA

SEQ ID NO: 212356 - DNA, 80 bp, synthetic construct; identical to SEQ ID NO: 27626
  source 1..80: mol_type = other DNA

SEQ ID NO: 212357 - DNA, 80 bp, synthetic construct; identical to SEQ ID NO: 27627
  source 1..80: mol_type = other DNA

SEQ ID NO: 212358 - DNA, 80 bp, synthetic construct; identical to SEQ ID NO: 27628
  source 1..80: mol_type = other DNA

SEQ ID NO: 212359 - DNA, 80 bp, synthetic construct; identical to SEQ ID NO: 27629
  source 1..80: mol_type = other DNA

SEQ ID NO: 212360 - DNA, 80 bp, synthetic construct; identical to SEQ ID NO: 27630
  source 1..80: mol_type = other DNA

SEQ ID NO: 212361 - DNA, 80 bp, synthetic construct; identical to SEQ ID NO: 27631
  source 1..80: mol_type = other DNA

SEQ ID NO: 212362 - DNA, 80 bp, synthetic construct; identical to SEQ ID NO: 27632
  source 1..80: mol_type = other DNA

SEQ ID NO: 212363 - DNA, 80 bp, synthetic construct; identical to SEQ ID NO: 27633
  source 1..80: mol_type = other DNA

SEQ ID NO: 212364 - DNA, 80 bp, synthetic construct; identical to SEQ ID NO: 27634
  source 1..80: mol_type = other DNA

SEQ ID NO: 212365 - DNA, 80 bp, synthetic construct; identical to SEQ ID NO: 27635
  source 1..80: mol_type = other DNA

SEQ ID NO: 212366 - DNA, 80 bp, synthetic construct; identical to SEQ ID NO: 27636
  source 1..80: mol_type = other DNA

SEQ ID NO: 212367 - DNA, 80 bp, synthetic construct; identical to SEQ ID NO: 27637
  source 1..80: mol_type = other DNA

SEQ ID NO: 212368 - DNA, 80 bp, synthetic construct; identical to SEQ ID NO: 27638
  source 1..80: mol_type = other DNA

SEQ ID NO: 212369 - DNA, 80 bp, synthetic construct; identical to SEQ ID NO: 27639
  source 1..80: mol_type = other DNA

SEQ ID NO: 212370 - DNA, 80 bp, synthetic construct; identical to SEQ ID NO: 27640
  source 1..80: mol_type = other DNA

SEQ ID NO: 212371 - DNA, 80 bp, synthetic construct; identical to SEQ ID NO: 27641
  source 1..80: mol_type = other DNA

SEQ ID NO: 212372 - DNA, 80 bp, synthetic construct; identical to SEQ ID NO: 27642
  source 1..80: mol_type = other DNA

SEQ ID NO: 212373 - DNA, 80 bp, synthetic construct; identical to SEQ ID NO: 27643
  source 1..80: mol_type = other DNA

SEQ ID NO: 212374 - DNA, 80 bp, synthetic construct; identical to SEQ ID NO: 27644
  source 1..80: mol_type = other DNA

SEQ ID NO: 212375 - DNA, 80 bp, synthetic construct; identical to SEQ ID NO: 27645
  source 1..80: mol_type = other DNA

SEQ ID NO: 212376 - DNA, 80 bp, synthetic construct; identical to SEQ ID NO: 27646
  source 1..80: mol_type = other DNA

SEQ ID NO: 212377 - DNA, 80 bp, synthetic construct; identical to SEQ ID NO: 27647
  source 1..80: mol_type = other DNA

SEQ ID NO: 212378 - DNA, 80 bp, synthetic construct; identical to SEQ ID NO: 27648
  source 1..80: mol_type = other DNA

SEQ ID NO: 212379 - DNA, 80 bp, synthetic construct; identical to SEQ ID NO: 27649
  source 1..80: mol_type = other DNA

SEQ ID NO: 212380 - DNA, 80 bp, synthetic construct; identical to SEQ ID NO: 27650
  source 1..80: mol_type = other DNA

SEQ ID NO: 212381 - DNA, 80 bp, synthetic construct; identical to SEQ ID NO: 27651
  source 1..80: mol_type = other DNA

SEQ ID NO: 212382 - DNA, 80 bp, synthetic construct; identical to SEQ ID NO: 27652
  source 1..80: mol_type = other DNA

SEQ ID NO: 212383 - DNA, 80 bp, synthetic construct; identical to SEQ ID NO: 27653
  source 1..80: mol_type = other DNA

SEQ ID NO: 212384 - DNA, 80 bp, synthetic construct; identical to SEQ ID NO: 27654
  source 1..80: mol_type = other DNA

SEQ ID NO: 212385 - DNA, 80 bp, synthetic construct; identical to SEQ ID NO: 27655
  source 1..80: mol_type = other DNA

SEQ ID NO: 212386 - DNA, 80 bp, synthetic construct; identical to SEQ ID NO: 27656
  source 1..80: mol_type = other DNA

SEQ ID NO: 212387 - DNA, 80 bp, synthetic construct; identical to SEQ ID NO: 27657
  source 1..80: mol_type = other DNA

SEQ ID NO: 212388 - DNA, 80 bp, synthetic construct; identical to SEQ ID NO: 27658
  source 1..80: mol_type = other DNA

SEQ ID NO: 212389 - DNA, 80 bp, synthetic construct; identical to SEQ ID NO: 27659
  source 1..80: mol_type = other DNA

SEQ ID NO: 212390 - DNA, 80 bp, synthetic construct; identical to SEQ ID NO: 27660
  source 1..80: mol_type = other DNA

SEQ ID NO: 212391 - DNA, 80 bp, synthetic construct; identical to SEQ ID NO: 27661
  source 1..80: mol_type = other DNA

SEQ ID NO: 212392 - DNA, 80 bp, synthetic construct; identical to SEQ ID NO: 27662
  source 1..80: mol_type = other DNA

SEQ ID NO: 212393 - DNA, 80 bp, synthetic construct; identical to SEQ ID NO: 27663
  source 1..80: mol_type = other DNA

SEQ ID NO: 212394 - DNA, 80 bp, synthetic construct; identical to SEQ ID NO: 27664
  source 1..80: mol_type = other DNA

SEQ ID NO: 212395 - DNA, 80 bp, synthetic construct; identical to SEQ ID NO: 27665
  source 1..80: mol_type = other DNA

SEQ ID NO: 212396 - DNA, 80 bp, synthetic construct; identical to SEQ ID NO: 27666
  source 1..80: mol_type = other DNA

SEQ ID NO: 212397 - DNA, 80 bp, synthetic construct; identical to SEQ ID NO: 27667
  source 1..80: mol_type = other DNA

SEQ ID NO: 212398 - DNA, 80 bp, synthetic construct; identical to SEQ ID NO: 27668
  source 1..80: mol_type = other DNA

SEQ ID NO: 212399 - DNA, 80 bp, synthetic construct; identical to SEQ ID NO: 27669
  source 1..80: mol_type = other DNA

SEQ ID NO: 212400 - DNA, 80 bp, synthetic construct; identical to SEQ ID NO: 27670
  source 1..80: mol_type = other DNA

SEQ ID NO: 212401 - DNA, 80 bp, synthetic construct; identical to SEQ ID NO: 27671
  source 1..80: mol_type = other DNA

SEQ ID NO: 212402 - DNA, 80 bp, synthetic construct; identical to SEQ ID NO: 27672
  source 1..80: mol_type = other DNA

SEQ ID NO: 212403 - DNA, 80 bp, synthetic construct; identical to SEQ ID NO: 27673
  source 1..80: mol_type = other DNA

SEQ ID NO: 212404 - DNA, 80 bp, synthetic construct; identical to SEQ ID NO: 27674
  source 1..80: mol_type = other DNA

SEQ ID NO: 212405 - DNA, 80 bp, synthetic construct; identical to SEQ ID NO: 27675
  source 1..80: mol_type = other DNA

SEQ ID NO: 212406 - DNA, 80 bp, synthetic construct; identical to SEQ ID NO: 27676
  source 1..80: mol_type = other DNA

SEQ ID NO: 212407 - DNA, 80 bp, synthetic construct; identical to SEQ ID NO: 27677
  source 1..80: mol_type = other DNA

SEQ ID NO: 212408 - DNA, 80 bp, synthetic construct; identical to SEQ ID NO: 27678
  source 1..80: mol_type = other DNA

SEQ ID NO: 212409 - DNA, 80 bp, synthetic construct; identical to SEQ ID NO: 27679
  source 1..80: mol_type = other DNA

SEQ ID NO: 212410 - DNA, 80 bp, synthetic construct; identical to SEQ ID NO: 27680
  source 1..80: mol_type = other DNA

SEQ ID NO: 212411 - DNA, 80 bp, synthetic construct; identical to SEQ ID NO: 27681
  source 1..80: mol_type = other DNA

SEQ ID NO: 212412 - DNA, 80 bp, synthetic construct; identical to SEQ ID NO: 27682
  source 1..80: mol_type = other DNA

SEQ ID NO: 212413 - DNA, 80 bp, synthetic construct; identical to SEQ ID NO: 27683
  source 1..80: mol_type = other DNA

SEQ ID NO: 212414 - DNA, 80 bp, synthetic construct; identical to SEQ ID NO: 27684
  source 1..80: mol_type = other DNA

SEQ ID NO: 212415 - DNA, 80 bp, synthetic construct; identical to SEQ ID NO: 27685
  source 1..80: mol_type = other DNA

SEQ ID NO: 212416 - DNA, 80 bp, synthetic construct; identical to SEQ ID NO: 27686
  source 1..80: mol_type = other DNA

SEQ ID NO: 212417 - DNA, 80 bp, synthetic construct; identical to SEQ ID NO: 27687
  source 1..80: mol_type = other DNA

SEQ ID NO: 212418 - DNA, 80 bp, synthetic construct; identical to SEQ ID NO: 27688
  source 1..80: mol_type = other DNA

SEQ ID NO: 212419 - DNA, 80 bp, synthetic construct; identical to SEQ ID NO: 27689
  source 1..80: mol_type = other DNA

SEQ ID NO: 212420 - DNA, 80 bp, synthetic construct; identical to SEQ ID NO: 27690
  source 1..80: mol_type = other DNA

SEQ ID NO: 212421 - DNA, 80 bp, synthetic construct; identical to SEQ ID NO: 27691
  source 1..80: mol_type = other DNA

SEQ ID NO: 212422 - DNA, 80 bp, synthetic construct; identical to SEQ ID NO: 27692
  source 1..80: mol_type = other DNA

SEQ ID NO: 212423 - DNA, 80 bp, synthetic construct; identical to SEQ ID NO: 27693
  source 1..80: mol_type = other DNA

SEQ ID NO: 212424 - DNA, 80 bp, synthetic construct; identical to SEQ ID NO: 27694
  source 1..80: mol_type = other DNA

SEQ ID NO: 212425 - DNA, 80 bp, synthetic construct; identical to SEQ ID NO: 27695
  source 1..80: mol_type = other DNA

SEQ ID NO: 212426 - DNA, 80 bp, synthetic construct; identical to SEQ ID NO: 27696
  source 1..80: mol_type = other DNA

SEQ ID NO: 212427 - DNA, 80 bp, synthetic construct; identical to SEQ ID NO: 27697
  source 1..80: mol_type = other DNA

SEQ ID NO: 212428 - DNA, 80 bp, synthetic construct; identical to SEQ ID NO: 27698
  source 1..80: mol_type = other DNA

SEQ ID NO: 212429 - DNA, 80 bp, synthetic construct; identical to SEQ ID NO: 27699
  source 1..80: mol_type = other DNA

SEQ ID NO: 212430 - DNA, 80 bp, synthetic construct; identical to SEQ ID NO: 27700
  source 1..80: mol_type = other DNA

SEQ ID NO: 212431 - DNA, 80 bp, synthetic construct; identical to SEQ ID NO: 27701
  source 1..80: mol_type = other DNA

SEQ ID NO: 212432 - DNA, 80 bp, synthetic construct; identical to SEQ ID NO: 27702
  source 1..80: mol_type = other DNA

SEQ ID NO: 212433 - DNA, 80 bp, synthetic construct; identical to SEQ ID NO: 27703
  source 1..80: mol_type = other DNA

SEQ ID NO: 212434 - DNA, 80 bp, synthetic construct; identical to SEQ ID NO: 27704
  source 1..80: mol_type = other DNA

SEQ ID NO: 212435 - DNA, 80 bp, synthetic construct; identical to SEQ ID NO: 27705
  source 1..80: mol_type = other DNA

SEQ ID NO: 212436 - DNA, 80 bp, synthetic construct; identical to SEQ ID NO: 27706
  source 1..80: mol_type = other DNA

SEQ ID NO: 212437 - DNA, 80 bp, synthetic construct; identical to SEQ ID NO: 27707
  source 1..80: mol_type = other DNA

SEQ ID NO: 212438 - DNA, 80 bp, synthetic construct; identical to SEQ ID NO: 27708
  source 1..80: mol_type = other DNA

SEQ ID NO: 212439 - DNA, 80 bp, synthetic construct; identical to SEQ ID NO: 27709
  source 1..80: mol_type = other DNA

SEQ ID NO: 212440 - DNA, 80 bp, synthetic construct; identical to SEQ ID NO: 27710
  source 1..80: mol_type = other DNA

SEQ ID NO: 212441 - DNA, 80 bp, synthetic construct; identical to SEQ ID NO: 27711
  source 1..80: mol_type = other DNA

SEQ ID NO: 212442 - DNA, 80 bp, synthetic construct; identical to SEQ ID NO: 27712
  source 1..80: mol_type = other DNA

SEQ ID NO: 212443 - DNA, 80 bp, synthetic construct; identical to SEQ ID NO: 27713
  source 1..80: mol_type = other DNA

SEQ ID NO: 212444 - DNA, 80 bp, synthetic construct; identical to SEQ ID NO: 27714
  source 1..80: mol_type = other DNA

SEQ ID NO: 212445 - DNA, 80 bp, synthetic construct; identical to SEQ ID NO: 27715
  source 1..80: mol_type = other DNA

SEQ ID NO: 212446 - DNA, 80 bp, synthetic construct; identical to SEQ ID NO: 27716
  source 1..80: mol_type = other DNA

SEQ ID NO: 212447 - DNA, 80 bp, synthetic construct; identical to SEQ ID NO: 27717
  source 1..80: mol_type = other DNA

SEQ ID NO: 212448 - DNA, 80 bp, synthetic construct; identical to SEQ ID NO: 27718
  source 1..80: mol_type = other DNA

SEQ ID NO: 212449 - DNA, 80 bp, synthetic construct; identical to SEQ ID NO: 27719
  source 1..80: mol_type = other DNA

SEQ ID NO: 212450 - DNA, 80 bp, synthetic construct; identical to SEQ ID NO: 27720
  source 1..80: mol_type = other DNA

SEQ ID NO: 212451 - DNA, 80 bp, synthetic construct; identical to SEQ ID NO: 27721
  source 1..80: mol_type = other DNA

SEQ ID NO: 212452 - DNA, 80 bp, synthetic construct; identical to SEQ ID NO: 27722
  source 1..80: mol_type = other DNA

SEQ ID NO: 212453 - DNA, 80 bp, synthetic construct; identical to SEQ ID NO: 27723
  source 1..80: mol_type = other DNA

SEQ ID NO: 212454 - DNA, 80 bp, synthetic construct; identical to SEQ ID NO: 27724
  source 1..80: mol_type = other DNA

SEQ ID NO: 212455 - DNA, 80 bp, synthetic construct; identical to SEQ ID NO: 27725
  source 1..80: mol_type = other DNA

SEQ ID NO: 212456 - DNA, 80 bp, synthetic construct; identical to SEQ ID NO: 27726
  source 1..80: mol_type = other DNA

SEQ ID NO: 212457 - DNA, 80 bp, synthetic construct; identical to SEQ ID NO: 27727
  source 1..80: mol_type = other DNA

SEQ ID NO: 212458 - DNA, 80 bp, synthetic construct; identical to SEQ ID NO: 27728
  source 1..80: mol_type = other DNA

SEQ ID NO: 212459 - DNA, 80 bp, synthetic construct; identical to SEQ ID NO: 27729
  source 1..80: mol_type = other DNA

SEQ ID NO: 212460 - DNA, 80 bp, synthetic construct; identical to SEQ ID NO: 27730
  source 1..80: mol_type = other DNA

SEQ ID NO: 212461 - DNA, 80 bp, synthetic construct; identical to SEQ ID NO: 27731
  source 1..80: mol_type = other DNA

SEQ ID NO: 212462 - DNA, 80 bp, synthetic construct; identical to SEQ ID NO: 27732
  source 1..80: mol_type = other DNA

SEQ ID NO: 212463 - DNA, 80 bp, synthetic construct; identical to SEQ ID NO: 27733
  source 1..80: mol_type = other DNA

SEQ ID NO: 212464 - DNA, 80 bp, synthetic construct; identical to SEQ ID NO: 27734
  source 1..80: mol_type = other DNA

SEQ ID NO: 212465 - DNA, 80 bp, synthetic construct; identical to SEQ ID NO: 27735
  source 1..80: mol_type = other DNA

SEQ ID NO: 212466 - DNA, 80 bp, synthetic construct; identical to SEQ ID NO: 27736
  source 1..80: mol_type = other DNA

SEQ ID NO: 212467 - DNA, 80 bp, synthetic construct; identical to SEQ ID NO: 27737
  source 1..80: mol_type = other DNA

SEQ ID NO: 212468 - DNA, 80 bp, synthetic construct; identical to SEQ ID NO: 27738
  source 1..80: mol_type = other DNA

SEQ ID NO: 212469 - DNA, 80 bp, synthetic construct; identical to SEQ ID NO: 27739
  source 1..80: mol_type = other DNA

SEQ ID NO: 212470 - DNA, 80 bp, synthetic construct; identical to SEQ ID NO: 27740
  source 1..80: mol_type = other DNA

SEQ ID NO: 212471 - DNA, 80 bp, synthetic construct; identical to SEQ ID NO: 27741
  source 1..80: mol_type = other DNA

SEQ ID NO: 212472 - DNA, 80 bp, synthetic construct; identical to SEQ ID NO: 27742
  source 1..80: mol_type = other DNA

SEQ ID NO: 212473 - DNA, 80 bp, synthetic construct; identical to SEQ ID NO: 27743
  source 1..80: mol_type = other DNA

SEQ ID NO: 212474 - DNA, 80 bp, synthetic construct; identical to SEQ ID NO: 27744
  source 1..80: mol_type = other DNA

SEQ ID NO: 212475 - DNA, 80 bp, synthetic construct; identical to SEQ ID NO: 27745
  source 1..80: mol_type = other DNA

SEQ ID NO: 212476 - DNA, 80 bp, synthetic construct; identical to SEQ ID NO: 27746
  source 1..80: mol_type = other DNA

SEQ ID NO: 212477 - DNA, 80 bp, synthetic construct; identical to SEQ ID NO: 27747
  source 1..80: mol_type = other DNA

SEQ ID NO: 212478 - DNA, 80 bp, synthetic construct; identical to SEQ ID NO: 27748
  source 1..80: mol_type = other DNA

SEQ ID NO: 212479 - DNA, 80 bp, synthetic construct; identical to SEQ ID NO: 27749
  source 1..80: mol_type = other DNA

SEQ ID NO: 212480 - DNA, 80 bp, synthetic construct; identical to SEQ ID NO: 27750
  source 1..80: mol_type = other DNA

SEQ ID NO: 212481 - DNA, 80 bp, synthetic construct; identical to SEQ ID NO: 27751
  source 1..80: mol_type = other DNA

SEQ ID NO: 212482 - DNA, 80 bp, synthetic construct; identical to SEQ ID NO: 27752
  source 1..80: mol_type = other DNA

SEQ ID NO: 212483 - DNA, 80 bp, synthetic construct; identical to SEQ ID NO: 27753
  source 1..80: mol_type = other DNA

SEQ ID NO: 212484 - DNA, 80 bp, synthetic construct; identical to SEQ ID NO: 27754
  source 1..80: mol_type = other DNA

SEQ ID NO: 212485 - DNA, 80 bp, synthetic construct; identical to SEQ ID NO: 27755
  source 1..80: mol_type = other DNA

SEQ ID NO: 212486 - DNA, 80 bp, synthetic construct; identical to SEQ ID NO: 27756
  source 1..80: mol_type = other DNA

SEQ ID NO: 212487 - DNA, 80 bp, synthetic construct; identical to SEQ ID NO: 27757
  source 1..80: mol_type = other DNA

SEQ ID NO: 212488 - DNA, 80 bp, synthetic construct; identical to SEQ ID NO: 27758
  source 1..80: mol_type = other DNA

SEQ ID NO: 212489 - DNA, 80 bp, synthetic construct; identical to SEQ ID NO: 27759
  source 1..80: mol_type = other DNA

SEQ ID NO: 212490 - DNA, 80 bp, synthetic construct; identical to SEQ ID NO: 27760
  source 1..80: mol_type = other DNA

SEQ ID NO: 212491 - DNA, 80 bp, synthetic construct; identical to SEQ ID NO: 27761
  source 1..80: mol_type = other DNA

SEQ ID NO: 212492 - DNA, 80 bp, synthetic construct; identical to SEQ ID NO: 27762
  source 1..80: mol_type = other DNA

SEQ ID NO: 212493 - DNA, 80 bp, synthetic construct; identical to SEQ ID NO: 27763
  source 1..80: mol_type = other DNA

SEQ ID NO: 212494 - DNA, 80 bp, synthetic construct; identical to SEQ ID NO: 27764
  source 1..80: mol_type = other DNA

SEQ ID NO: 212495 - DNA, 80 bp, synthetic construct; identical to SEQ ID NO: 27765
  source 1..80: mol_type = other DNA

SEQ ID NO: 212496 - DNA, 80 bp, synthetic construct; identical to SEQ ID NO: 27766
  source 1..80: mol_type = other DNA

SEQ ID NO: 212497 - DNA, 80 bp, synthetic construct; identical to SEQ ID NO: 27767
  source 1..80: mol_type = other DNA

SEQ ID NO: 212498 - DNA, 80 bp, synthetic construct; identical to SEQ ID NO: 27768
  source 1..80: mol_type = other DNA

SEQ ID NO: 212499 - DNA, 80 bp, synthetic construct; identical to SEQ ID NO: 27769
  source 1..80: mol_type = other DNA

SEQ ID NO: 212500 - DNA, 80 bp, synthetic construct; identical to SEQ ID NO: 27770
  source 1..80: mol_type = other DNA

SEQ ID NO: 212501 - DNA, 80 bp, synthetic construct; identical to SEQ ID NO: 27771
  source 1..80: mol_type = other DNA

SEQ ID NO: 212502 - DNA, 80 bp, synthetic construct; identical to SEQ ID NO: 27772
  source 1..80: mol_type = other DNA

SEQ ID NO: 212503 - DNA, 80 bp, synthetic construct; identical to SEQ ID NO: 27773
  source 1..80: mol_type = other DNA

SEQ ID NO: 212504 - DNA, 80 bp, synthetic construct; identical to SEQ ID NO: 27774
  source 1..80: mol_type = other DNA

SEQ ID NO: 212505 - DNA, 80 bp, synthetic construct; identical to SEQ ID NO: 27775
  source 1..80: mol_type = other DNA

SEQ ID NO: 212506 - DNA, 80 bp, synthetic construct; identical to SEQ ID NO: 27776
  source 1..80: mol_type = other DNA

SEQ ID NO: 212507 - DNA, 80 bp, synthetic construct; identical to SEQ ID NO: 27777
  source 1..80: mol_type = other DNA

SEQ ID NO: 212508 - DNA, 80 bp, synthetic construct; identical to SEQ ID NO: 27778
  source 1..80: mol_type = other DNA

SEQ ID NO: 212509 - DNA, 80 bp, synthetic construct; identical to SEQ ID NO: 27779
  source 1..80: mol_type = other DNA

SEQ ID NO: 212510 - DNA, 80 bp, synthetic construct; identical to SEQ ID NO: 27780
  source 1..80: mol_type = other DNA

SEQ ID NO: 212511 - DNA, 80 bp, synthetic construct; identical to SEQ ID NO: 27781
  source 1..80: mol_type = other DNA

SEQ ID NO: 212512 - DNA, 80 bp, synthetic construct; identical to SEQ ID NO: 27782
  source 1..80: mol_type = other DNA

SEQ ID NO: 212513 - DNA, 80 bp, synthetic construct; identical to SEQ ID NO: 27783
  source 1..80: mol_type = other DNA

SEQ ID NO: 212514 - DNA, 80 bp, synthetic construct; identical to SEQ ID NO: 27784
  source 1..80: mol_type = other DNA

SEQ ID NO: 212515 - DNA, 80 bp, synthetic construct; identical to SEQ ID NO: 27785
  source 1..80: mol_type = other DNA

SEQ ID NO: 212516 - DNA, 80 bp, synthetic construct; identical to SEQ ID NO: 27786
  source 1..80: mol_type = other DNA

SEQ ID NO: 212517 - DNA, 80 bp, synthetic construct; identical to SEQ ID NO: 27787
  source 1..80: mol_type = other DNA

SEQ ID NO: 212518 - DNA, 80 bp, synthetic construct; identical to SEQ ID NO: 27788
  source 1..80: mol_type = other DNA

SEQ ID NO: 212519 - DNA, 80 bp, synthetic construct; identical to SEQ ID NO: 27789
  source 1..80: mol_type = other DNA

SEQ ID NO: 212520 - DNA, 80 bp, synthetic construct; identical to SEQ ID NO: 27790
  source 1..80: mol_type = other DNA

SEQ ID NO: 212521 - DNA, 80 bp, synthetic construct; identical to SEQ ID NO: 27791
  source 1..80: mol_type = other DNA

SEQ ID NO: 212522 - DNA, 80 bp, synthetic construct; identical to SEQ ID NO: 27792
  source 1..80: mol_type = other DNA

SEQ ID NO: 212523 - DNA, 80 bp, synthetic construct; identical to SEQ ID NO: 27793
  source 1..80: mol_type = other DNA

SEQ ID NO: 212524 - DNA, 80 bp, synthetic construct; identical to SEQ ID NO: 27794
  source 1..80: mol_type = other DNA

SEQ ID NO: 212525 - DNA, 80 bp, synthetic construct; identical to SEQ ID NO: 27795
  source 1..80: mol_type = other DNA

SEQ ID NO: 212526 - DNA, 80 bp, synthetic construct; identical to SEQ ID NO: 27796
  source 1..80: mol_type = other DNA

SEQ ID NO: 212527 - DNA, 80 bp, synthetic construct; identical to SEQ ID NO: 27797
  source 1..80: mol_type = other DNA

SEQ ID NO: 212528 - DNA, 80 bp, synthetic construct; identical to SEQ ID NO: 27798
  source 1..80: mol_type = other DNA

SEQ ID NO: 212529 - DNA, 80 bp, synthetic construct; identical to SEQ ID NO: 27799
  source 1..80: mol_type = other DNA

SEQ ID NO: 212530 - DNA, 80 bp, synthetic construct; identical to SEQ ID NO: 27800
  source 1..80: mol_type = other DNA

SEQ ID NO: 212531 - DNA, 80 bp, synthetic construct; identical to SEQ ID NO: 27801
  source 1..80: mol_type = other DNA

SEQ ID NO: 212532 - DNA, 80 bp, synthetic construct; identical to SEQ ID NO: 27802
  source 1..80: mol_type = other DNA

SEQ ID NO: 212533 - DNA, 80 bp, synthetic construct; identical to SEQ ID NO: 27803
  source 1..80: mol_type = other DNA

SEQ ID NO: 212534 - DNA, 80 bp, synthetic construct; identical to SEQ ID NO: 27804
  source 1..80: mol_type = other DNA

SEQ ID NO: 212535 - DNA, 80 bp, synthetic construct; identical to SEQ ID NO: 27805
  source 1..80: mol_type = other DNA

SEQ ID NO: 212536 - DNA, 80 bp, synthetic construct; identical to SEQ ID NO: 27806
  source 1..80: mol_type = other DNA

SEQ ID NO: 212537 - DNA, 80 bp, synthetic construct; identical to SEQ ID NO: 27807
  source 1..80: mol_type = other DNA

SEQ ID NO: 212538 - DNA, 80 bp, synthetic construct; identical to SEQ ID NO: 27808
  source 1..80: mol_type = other DNA

SEQ ID NO: 212539 - DNA, 80 bp, synthetic construct; identical to SEQ ID NO: 27809
  source 1..80: mol_type = other DNA

SEQ ID NO: 212540 - DNA, 80 bp, synthetic construct; identical to SEQ ID NO: 27810
  source 1..80: mol_type = other DNA

SEQ ID NO: 212541 - DNA, 80 bp, synthetic construct; identical to SEQ ID NO: 27811
  source 1..80: mol_type = other DNA

SEQ ID NO: 212542 - DNA, 80 bp, synthetic construct; identical to SEQ ID NO: 27812
  source 1..80: mol_type = other DNA

SEQ ID NO: 212543 - DNA, 80 bp, synthetic construct; identical to SEQ ID NO: 27813
  source 1..80: mol_type = other DNA

SEQ ID NO: 212544 - DNA, 80 bp, synthetic construct; identical to SEQ ID NO: 27814
  source 1..80: mol_type = other DNA

SEQ ID NO: 212545 - DNA, 80 bp, synthetic construct; identical to SEQ ID NO: 27815
  source 1..80: mol_type = other DNA

SEQ ID NO: 212546 - DNA, 80 bp, synthetic construct; identical to SEQ ID NO: 27816
  source 1..80: mol_type = other DNA

SEQ ID NO: 212547 - DNA, 80 bp, synthetic construct; identical to SEQ ID NO: 27817
  source 1..80: mol_type = other DNA

SEQ ID NO: 212548 - DNA, 80 bp, synthetic construct; identical to SEQ ID NO: 27818
  source 1..80: mol_type = other DNA

SEQ ID NO: 212549 - DNA, 80 bp, synthetic construct; identical to SEQ ID NO: 27819
  source 1..80: mol_type = other DNA

SEQ ID NO: 212550 - DNA, 80 bp, synthetic construct; identical to SEQ ID NO: 27820
  source 1..80: mol_type = other DNA

SEQ ID NO: 212551 - DNA, 80 bp, synthetic construct; identical to SEQ ID NO: 27821
  source 1..80: mol_type = other DNA

SEQ ID NO: 212552 - DNA, 80 bp, synthetic construct; identical to SEQ ID NO: 27822
  source 1..80: mol_type = other DNA

SEQ ID NO: 212553 - DNA, 80 bp, synthetic construct; identical to SEQ ID NO: 27823
  source 1..80: mol_type = other DNA

SEQ ID NO: 212554 - DNA, 80 bp, synthetic construct; identical to SEQ ID NO: 27824
  source 1..80: mol_type = other DNA

SEQ ID NO: 212555 - DNA, 80 bp, synthetic construct; identical to SEQ ID NO: 27825
  source 1..80: mol_type = other DNA

SEQ ID NO: 212556 - DNA, 80 bp, synthetic construct; identical to SEQ ID NO: 27826
  source 1..80: mol_type = other DNA

SEQ ID NO: 212557 - DNA, 80 bp, synthetic construct; identical to SEQ ID NO: 27827
  source 1..80: mol_type = other DNA

SEQ ID NO: 212558 - DNA, 80 bp, synthetic construct; identical to SEQ ID NO: 27828
  source 1..80: mol_type = other DNA

SEQ ID NO: 212559 - DNA, 80 bp, synthetic construct; identical to SEQ ID NO: 27829
  source 1..80: mol_type = other DNA

SEQ ID NO: 212560 - DNA, 80 bp, synthetic construct; identical to SEQ ID NO: 27830
  source 1..80: mol_type = other DNA

SEQ ID NO: 212561 - DNA, 80 bp, synthetic construct; identical to SEQ ID NO: 27831
  source 1..80: mol_type = other DNA

SEQ ID NO: 212562 - DNA, 80 bp, synthetic construct; identical to SEQ ID NO: 27832
  source 1..80: mol_type = other DNA

SEQ ID NO: 212563 - DNA, 80 bp, synthetic construct; identical to SEQ ID NO: 27833
  source 1..80: mol_type = other DNA

SEQ ID NO: 212564 - DNA, 80 bp, synthetic construct; identical to SEQ ID NO: 27834
  source 1..80: mol_type = other DNA

SEQ ID NO: 212565 - DNA, 80 bp, synthetic construct; identical to SEQ ID NO: 27835
  source 1..80: mol_type = other DNA

SEQ ID NO: 212566 - DNA, 80 bp, synthetic construct; identical to SEQ ID NO: 27836
  source 1..80: mol_type = other DNA

SEQ ID NO: 212567 - DNA, 80 bp, synthetic construct; identical to SEQ ID NO: 27837
  source 1..80: mol_type = other DNA

SEQ ID NO: 212568 - DNA, 80 bp, synthetic construct; identical to SEQ ID NO: 27838
  source 1..80: mol_type = other DNA

SEQ ID NO: 212569 - DNA, 80 bp, synthetic construct; identical to SEQ ID NO: 27839
  source 1..80: mol_type = other DNA

SEQ ID NO: 212570 - DNA, 80 bp, synthetic construct; identical to SEQ ID NO: 27840
  source 1..80: mol_type = other DNA

SEQ ID NO: 212571 - DNA, 80 bp, synthetic construct; identical to SEQ ID NO: 27841
  source 1..80: mol_type = other DNA

SEQ ID NO: 212572 - DNA, 80 bp, synthetic construct; identical to SEQ ID NO: 27842
  source 1..80: mol_type = other DNA

SEQ ID NO: 212573 - DNA, 80 bp, synthetic construct; identical to SEQ ID NO: 27843
  source 1..80: mol_type = other DNA

SEQ ID NO: 212574 - DNA, 80 bp, synthetic construct; identical to SEQ ID NO: 27844
  source 1..80: mol_type = other DNA

SEQ ID NO: 212575 - DNA, 80 bp, synthetic construct; identical to SEQ ID NO: 27845
  source 1..80: mol_type = other DNA

SEQ ID NO: 212576 - DNA, 80 bp, synthetic construct; identical to SEQ ID NO: 27846
  source 1..80: mol_type = other DNA

SEQ ID NO: 212577 - DNA, 80 bp, synthetic construct; identical to SEQ ID NO: 27847
  source 1..80: mol_type = other DNA

SEQ ID NO: 212578 - DNA, 80 bp, synthetic construct; identical to SEQ ID NO: 27848
  source 1..80: mol_type = other DNA

SEQ ID NO: 212579 - DNA, 80 bp, synthetic construct; identical to SEQ ID NO: 27849
  source 1..80: mol_type = other DNA

SEQ ID NO: 212580 - DNA, 80 bp, synthetic construct; identical to SEQ ID NO: 27850
  source 1..80: mol_type = other DNA

SEQ ID NO: 212581 - DNA, 80 bp, synthetic construct; identical to SEQ ID NO: 27851
  source 1..80: mol_type = other DNA

SEQ ID NO: 212582 - DNA, 80 bp, synthetic construct; identical to SEQ ID NO: 27852
  source 1..80: mol_type = other DNA

SEQ ID NO: 212583 - DNA, 80 bp, synthetic construct; identical to SEQ ID NO: 27853
  source 1..80: mol_type = other DNA

SEQ ID NO: 212584 - DNA, 80 bp, synthetic construct; identical to SEQ ID NO: 27854
  source 1..80: mol_type = other DNA

SEQ ID NO: 212585 - DNA, 80 bp, synthetic construct; identical to SEQ ID NO: 27855
  source 1..80: mol_type = other DNA

SEQ ID NO: 212586 - DNA, 80 bp, synthetic construct; identical to SEQ ID NO: 27856
  source 1..80: mol_type = other DNA

SEQ ID NO: 212587 - DNA, 80 bp, synthetic construct; identical to SEQ ID NO: 27857
  source 1..80: mol_type = other DNA

SEQ ID NO: 212588 - DNA, 80 bp, synthetic construct; identical to SEQ ID NO: 27858
  source 1..80: mol_type = other DNA

SEQ ID NO: 212589 - DNA, 80 bp, synthetic construct; identical to SEQ ID NO: 27859
  source 1..80: mol_type = other DNA

SEQ ID NO: 212590 - DNA, 80 bp, synthetic construct; identical to SEQ ID NO: 27860
  source 1..80: mol_type = other DNA

SEQ ID NO: 212591 - DNA, 80 bp, synthetic construct; identical to SEQ ID NO: 27861
  source 1..80: mol_type = other DNA

SEQ ID NO: 212592 - DNA, 80 bp, synthetic construct; identical to SEQ ID NO: 27862
  source 1..80: mol_type = other DNA

SEQ ID NO: 212593 - DNA, 80 bp, synthetic construct; identical to SEQ ID NO: 27863
  source 1..80: mol_type = other DNA

SEQ ID NO: 212594 - DNA, 80 bp, synthetic construct; identical to SEQ ID NO: 27864
  source 1..80: mol_type = other DNA

SEQ ID NO: 212595 - DNA, 80 bp, synthetic construct; identical to SEQ ID NO: 27865
  source 1..80: mol_type = other DNA

SEQ ID NO: 212596 - DNA, 80 bp, synthetic construct; identical to SEQ ID NO: 27866
  source 1..80: mol_type = other DNA

SEQ ID NO: 212597 - DNA, 80 bp, synthetic construct; identical to SEQ ID NO: 27867
  source 1..80: mol_type = other DNA

SEQ ID NO: 212598 - DNA, 80 bp, synthetic construct; identical to SEQ ID NO: 27868
  source 1..80: mol_type = other DNA

SEQ ID NO: 212599 - DNA, 80 bp, synthetic construct; identical to SEQ ID NO: 27869
  source 1..80: mol_type = other DNA

SEQ ID NO: 212600 - DNA, 80 bp, synthetic construct; identical to SEQ ID NO: 27870
  source 1..80: mol_type = other DNA

SEQ ID NO: 212601 - DNA, 80 bp, synthetic construct; identical to SEQ ID NO: 27871
  source 1..80: mol_type = other DNA

SEQ ID NO: 212602 - DNA, 80 bp, synthetic construct; identical to SEQ ID NO: 27872
  source 1..80: mol_type = other DNA

SEQ ID NO: 212603 - DNA, 80 bp, synthetic construct; identical to SEQ ID NO: 27873
  source 1..80: mol_type = other DNA

SEQ ID NO: 212604 - DNA, 80 bp, synthetic construct; identical to SEQ ID NO: 27874
  source 1..80: mol_type = other DNA

SEQ ID NO: 212605 - DNA, 80 bp, synthetic construct; identical to SEQ ID NO: 27875
  source 1..80: mol_type = other DNA

SEQ ID NO: 212606 - DNA, 80 bp, synthetic construct; identical to SEQ ID NO: 27876
  source 1..80: mol_type = other DNA

SEQ ID NO: 212607 - DNA, 80 bp, synthetic construct; identical to SEQ ID NO: 27877
  source 1..80: mol_type = other DNA

SEQ ID NO: 212608 - DNA, 80 bp, synthetic construct; identical to SEQ ID NO: 27878
  source 1..80: mol_type = other DNA

SEQ ID NO: 212609 - DNA, 80 bp, synthetic construct; identical to SEQ ID NO: 27879
  source 1..80: mol_type = other DNA

SEQ ID NO: 212610 - DNA, 80 bp, synthetic construct; identical to SEQ ID NO: 27880
  source 1..80: mol_type = other DNA

SEQ ID NO: 212611 - DNA, 80 bp, synthetic construct; identical to SEQ ID NO: 27881
  source 1..80: mol_type = other DNA

SEQ ID NO: 212612 - DNA, 80 bp, synthetic construct; identical to SEQ ID NO: 27882
  source 1..80: mol_type = other DNA

SEQ ID NO: 212613 - DNA, 80 bp, synthetic construct; identical to SEQ ID NO: 27883
  source 1..80: mol_type = other DNA

SEQ ID NO: 212614 - DNA, 80 bp, synthetic construct; identical to SEQ ID NO: 27884
  source 1..80: mol_type = other DNA

SEQ ID NO: 212615 - DNA, 80 bp, synthetic construct; identical to SEQ ID NO: 27885
  source 1..80: mol_type = other DNA

SEQ ID NO: 212616 - DNA, 80 bp, synthetic construct; identical to SEQ ID NO: 27886
  source 1..80: mol_type = other DNA

SEQ ID NO: 212617 - DNA, 80 bp, synthetic construct; identical to SEQ ID NO: 27887
  source 1..80: mol_type = other DNA

SEQ ID NO: 212618 - DNA, 80 bp, synthetic construct; identical to SEQ ID NO: 27888
  source 1..80: mol_type = other DNA

SEQ ID NO: 212619 - DNA, 80 bp, synthetic construct; identical to SEQ ID NO: 27889
  source 1..80: mol_type = other DNA

SEQ ID NO: 212620 - DNA, 80 bp, synthetic construct; identical to SEQ ID NO: 27890
  source 1..80: mol_type = other DNA

SEQ ID NO: 212621 - DNA, 80 bp, synthetic construct; identical to SEQ ID NO: 27891
  source 1..80: mol_type = other DNA

SEQ ID NO: 212622 - DNA, 80 bp, synthetic construct; identical to SEQ ID NO: 27892
  source 1..80: mol_type = other DNA

SEQ ID NO: 212623 - DNA, 80 bp, synthetic construct; identical to SEQ ID NO: 27893
  source 1..80: mol_type = other DNA

SEQ ID NO: 212624 - DNA, 80 bp, synthetic construct; identical to SEQ ID NO: 27894
  source 1..80: mol_type = other DNA

SEQ ID NO: 212625 - DNA, 80 bp, synthetic construct; identical to SEQ ID NO: 27895
  source 1..80: mol_type = other DNA

SEQ ID NO: 212626 - DNA, 80 bp, synthetic construct; identical to SEQ ID NO: 27896
  source 1..80: mol_type = other DNA

SEQ ID NO: 212627 - DNA, 80 bp, synthetic construct; identical to SEQ ID NO: 27897
  source 1..80: mol_type = other DNA

SEQ ID NO: 212628 - DNA, 80 bp, synthetic construct; identical to SEQ ID NO: 27898
  source 1..80: mol_type = other DNA

SEQ ID NO: 212629 - DNA, 80 bp, synthetic construct; identical to SEQ ID NO: 27899
  source 1..80: mol_type = other DNA

SEQ ID NO: 212630 - DNA, 80 bp, synthetic construct; identical to SEQ ID NO: 27900
  source 1..80: mol_type = other DNA

SEQ ID NO: 212631 - DNA, 80 bp, synthetic construct; identical to SEQ ID NO: 27901
  source 1..80: mol_type = other DNA

SEQ ID NO: 212632 - DNA, 80 bp, synthetic construct; identical to SEQ ID NO: 27902
  source 1..80: mol_type = other DNA

SEQ ID NO: 212633 - DNA, 80 bp, synthetic construct; identical to SEQ ID NO: 27903
  source 1..80: mol_type = other DNA

SEQ ID NO: 212634 - DNA, 80 bp, synthetic construct; identical to SEQ ID NO: 27904
  source 1..80: mol_type = other DNA

SEQ ID NO: 212635 - DNA, 80 bp, synthetic construct; identical to SEQ ID NO: 27905
  source 1..80: mol_type = other DNA

SEQ ID NO: 212636 - DNA, 80 bp, synthetic construct; identical to SEQ ID NO: 27906
  source 1..80: mol_type = other DNA

SEQ ID NO: 212637 - DNA, 80 bp, synthetic construct; identical to SEQ ID NO: 27907
  source 1..80: mol_type = other DNA

SEQ ID NO: 212638 - DNA, 80 bp, synthetic construct; identical to SEQ ID NO: 27908
  source 1..80: mol_type = other DNA

SEQ ID NO: 212639 - DNA, 80 bp, synthetic construct; identical to SEQ ID NO: 27909
  source 1..80: mol_type = other DNA

SEQ ID NO: 212640 - DNA, 80 bp, synthetic construct; identical to SEQ ID NO: 27910
  source 1..80: mol_type = other DNA

SEQ ID NO: 212641 - DNA, 80 bp, synthetic construct; identical to SEQ ID NO: 27911
  source 1..80: mol_type = other DNA

SEQ ID NO: 212642 - DNA, 80 bp, synthetic construct; identical to SEQ ID NO: 27912
  source 1..80: mol_type = other DNA

SEQ ID NO: 212643 - DNA, 80 bp, synthetic construct; identical to SEQ ID NO: 27913
  source 1..80: mol_type = other DNA

SEQ ID NO: 212644 - DNA, 80 bp, synthetic construct; identical to SEQ ID NO: 27914
  source 1..80: mol_type = other DNA

SEQ ID NO: 212645 - DNA, 80 bp, synthetic construct; identical to SEQ ID NO: 27915
  source 1..80: mol_type = other DNA

SEQ ID NO: 212646 - DNA, 80 bp, synthetic construct; identical to SEQ ID NO: 27916
  source 1..80: mol_type = other DNA

SEQ ID NO: 212647 - DNA, 80 bp, synthetic construct; identical to SEQ ID NO: 27917
  source 1..80: mol_type = other DNA

SEQ ID NO: 212648 - DNA, 80 bp, synthetic construct; identical to SEQ ID NO: 27918
  source 1..80: mol_type = other DNA

SEQ ID NO: 212649 - DNA, 80 bp, synthetic construct; identical to SEQ ID NO: 27919
  source 1..80: mol_type = other DNA

SEQ ID NO: 212650 - DNA, 80 bp, synthetic construct; identical to SEQ ID NO: 27920
  source 1..80: mol_type = other DNA

SEQ ID NO: 212651 - DNA, 80 bp, synthetic construct; identical to SEQ ID NO: 27921
  source 1..80: mol_type = other DNA

SEQ ID NO: 212652 - DNA, 80 bp, synthetic construct; identical to SEQ ID NO: 27922
  source 1..80: mol_type = other DNA

SEQ ID NO: 212653 - DNA, 80 bp, synthetic construct; identical to SEQ ID NO: 27923
  source 1..80: mol_type = other DNA

SEQ ID NO: 212654 - DNA, 80 bp, synthetic construct; identical to SEQ ID NO: 27924
  source 1..80: mol_type = other DNA

SEQ ID NO: 212655 - DNA, 80 bp, synthetic construct; identical to SEQ ID NO: 27925
  source 1..80: mol_type = other DNA

SEQ ID NO: 212656 - DNA, 80 bp, synthetic construct; identical to SEQ ID NO: 27926
  source 1..80: mol_type = other DNA

SEQ ID NO: 212657 - DNA, 80 bp, synthetic construct; identical to SEQ ID NO: 27927
  source 1..80: mol_type = other DNA

SEQ ID NO: 212658 - DNA, 80 bp, synthetic construct; identical to SEQ ID NO: 27928
  source 1..80: mol_type = other DNA

SEQ ID NO: 212659 - DNA, 80 bp, synthetic construct; identical to SEQ ID NO: 27929
  source 1..80: mol_type = other DNA

SEQ ID NO: 212660 - DNA, 80 bp, synthetic construct; identical to SEQ ID NO: 27930
  source 1..80: mol_type = other DNA

SEQ ID NO: 212661 - DNA, 80 bp, synthetic construct; identical to SEQ ID NO: 27931
  source 1..80: mol_type = other DNA

SEQ ID NO: 212662 - DNA, 80 bp, synthetic construct; identical to SEQ ID NO: 27932
  source 1..80: mol_type = other DNA

SEQ ID NO: 212663 - DNA, 80 bp, synthetic construct; identical to SEQ ID NO: 27933
  source 1..80: mol_type = other DNA

SEQ ID NO: 212664 - DNA, 80 bp, synthetic construct; identical to SEQ ID NO: 27934
  source 1..80: mol_type = other DNA

SEQ ID NO: 212665 - DNA, 80 bp, synthetic construct; identical to SEQ ID NO: 27935
  source 1..80: mol_type = other DNA

SEQ ID NO: 212666 - DNA, 80 bp, synthetic construct; identical to SEQ ID NO: 27936
  source 1..80: mol_type = other DNA

SEQ ID NO: 212667 - DNA, 80 bp, synthetic construct; identical to SEQ ID NO: 27937
  source 1..80: mol_type = other DNA

SEQ ID NO: 212668 - DNA, 80 bp, synthetic construct; identical to SEQ ID NO: 27938
  source 1..80: mol_type = other DNA

SEQ ID NO: 212669 - DNA, 80 bp, synthetic construct; identical to SEQ ID NO: 27939
  source 1..80: mol_type = other DNA

SEQ ID NO: 212670 - DNA, 80 bp, synthetic construct; identical to SEQ ID NO: 27940
  source 1..80: mol_type = other DNA

SEQ ID NO: 212671 - DNA, 80 bp, synthetic construct; identical to SEQ ID NO: 27941
  source 1..80: mol_type = other DNA

SEQ ID NO: 212672 - DNA, 80 bp, synthetic construct; identical to SEQ ID NO: 27942
  source 1..80: mol_type = other DNA

SEQ ID NO: 212673 - DNA, 80 bp, synthetic construct; identical to SEQ ID NO: 27943
  source 1..80: mol_type = other DNA

SEQ ID NO: 212674 - DNA, 80 bp, synthetic construct; identical to SEQ ID NO: 27944
  source 1..80: mol_type = other DNA

SEQ ID NO: 212675 - DNA, 80 bp, synthetic construct; identical to SEQ ID NO: 27945
  source 1..80: mol_type = other DNA

SEQ ID NO: 212676 - DNA, 80 bp, synthetic construct; identical to SEQ ID NO: 27946
  source 1..80: mol_type = other DNA

SEQ ID NO: 212677 - DNA, 80 bp, synthetic construct; identical to SEQ ID NO: 27947
  source 1..80: mol_type = other DNA

SEQ ID NO: 212678 - DNA, 80 bp, synthetic construct; identical to SEQ ID NO: 27948
  source 1..80: mol_type = other DNA

SEQ ID NO: 212679 - DNA, 80 bp, synthetic construct; identical to SEQ ID NO: 27949
  source 1..80: mol_type = other DNA

SEQ ID NO: 212680 - DNA, 80 bp, synthetic construct; identical to SEQ ID NO: 27950
  source 1..80: mol_type = other DNA

SEQ ID NO: 212681 - DNA, 80 bp, synthetic construct; identical to SEQ ID NO: 27951
  source 1..80: mol_type = other DNA

SEQ ID NO: 212682 - DNA, 80 bp, synthetic construct; identical to SEQ ID NO: 27952
  source 1..80: mol_type = other DNA

SEQ ID NO: 212683 - DNA, 80 bp, synthetic construct; identical to SEQ ID NO: 27953
  source 1..80: mol_type = other DNA

SEQ ID NO: 212684 - DNA, 80 bp, synthetic construct; identical to SEQ ID NO: 27954
  source 1..80: mol_type = other DNA

SEQ ID NO: 212685 - DNA, 80 bp, synthetic construct; identical to SEQ ID NO: 27955
  source 1..80: mol_type = other DNA

SEQ ID NO: 212686 - DNA, 80 bp, synthetic construct; identical to SEQ ID NO: 27956
  source 1..80: mol_type = other DNA

SEQ ID NO: 212687 - DNA, 80 bp, synthetic construct; identical to SEQ ID NO: 27957
  source 1..80: mol_type = other DNA

SEQ ID NO: 212688 - DNA, 80 bp, synthetic construct; identical to SEQ ID NO: 27958
  source 1..80: mol_type = other DNA

SEQ ID NO: 212689 - DNA, 80 bp, synthetic construct; identical to SEQ ID NO: 27959
  source 1..80: mol_type = other DNA

SEQ ID NO: 212690 - DNA, 80 bp, synthetic construct; identical to SEQ ID NO: 27960
  source 1..80: mol_type = other DNA

SEQ ID NO: 212691 - DNA, 80 bp, synthetic construct; identical to SEQ ID NO: 27961
  source 1..80: mol_type = other DNA

SEQ ID NO: 212692 - DNA, 80 bp, synthetic construct; identical to SEQ ID NO: 27962
  source 1..80: mol_type = other DNA

SEQ ID NO: 212693 - DNA, 80 bp, synthetic construct; identical to SEQ ID NO: 27963
  source 1..80: mol_type = other DNA

SEQ ID NO: 212694 - DNA, 80 bp, synthetic construct; identical to SEQ ID NO: 27964
  source 1..80: mol_type = other DNA

SEQ ID NO: 212695 - DNA, 80 bp, synthetic construct; identical to SEQ ID NO: 27965
  source 1..80: mol_type = other DNA

SEQ ID NO: 212696 - DNA, 80 bp, synthetic construct; identical to SEQ ID NO: 27966
  source 1..80: mol_type = other DNA

SEQ ID NO: 212697 - DNA, 80 bp, synthetic construct; identical to SEQ ID NO: 27967
  source 1..80: mol_type = other DNA

SEQ ID NO: 212698 - DNA, 80 bp, synthetic construct; identical to SEQ ID NO: 27968
  source 1..80: mol_type = other DNA

SEQ ID NO: 212699 - DNA, 80 bp, synthetic construct; identical to SEQ ID NO: 27969
  source 1..80: mol_type = other DNA

SEQ ID NO: 212700 - DNA, 80 bp, synthetic construct; identical to SEQ ID NO: 27970
  source 1..80: mol_type = other DNA

SEQ ID NO: 212701 - DNA, 80 bp, synthetic construct; identical to SEQ ID NO: 27971
  source 1..80: mol_type = other DNA

SEQ ID NO: 212702 - DNA, 80 bp, synthetic construct; identical to SEQ ID NO: 27972
  source 1..80: mol_type = other DNA

SEQ ID NO: 212703 - DNA, 80 bp, synthetic construct; identical to SEQ ID NO: 27973
  source 1..80: mol_type = other DNA

SEQ ID NO: 212704 - DNA, 80 bp, synthetic construct; identical to SEQ ID NO: 27974
  source 1..80: mol_type = other DNA

SEQ ID NO: 212705 - DNA, 80 bp, synthetic construct; identical to SEQ ID NO: 27975
  source 1..80: mol_type = other DNA

SEQ ID NO: 212706 - DNA, 80 bp, synthetic construct; identical to SEQ ID NO: 27976
  source 1..80: mol_type = other DNA

SEQ ID NO: 212707 - DNA, 80 bp, synthetic construct; identical to SEQ ID NO: 27977
  source 1..80: mol_type = other DNA

SEQ ID NO: 212708 - DNA, 80 bp, synthetic construct; identical to SEQ ID NO: 27978
  source 1..80: mol_type = other DNA

SEQ ID NO: 212709 - DNA, 80 bp, synthetic construct; identical to SEQ ID NO: 27979
  source 1..80: mol_type = other DNA

SEQ ID NO: 212710 - DNA, 80 bp, synthetic construct; identical to SEQ ID NO: 27980
  source 1..80: mol_type = other DNA

SEQ ID NO: 212711 - DNA, 80 bp, synthetic construct; identical to SEQ ID NO: 27981
  source 1..80: mol_type = other DNA

SEQ ID NO: 212712 - DNA, 80 bp, synthetic construct; identical to SEQ ID NO: 27982
  source 1..80: mol_type = other DNA

SEQ ID NO: 212713 - DNA, 80 bp, synthetic construct; identical to SEQ ID NO: 27983
  source 1..80: mol_type = other DNA

SEQ ID NO: 212714 - DNA, 80 bp, synthetic construct; identical to SEQ ID NO: 27984
  source 1..80: mol_type = other DNA

SEQ ID NO: 212715 - DNA, 80 bp, synthetic construct; identical to SEQ ID NO: 27985
  source 1..80: mol_type = other DNA

SEQ ID NO: 212716 - DNA, 80 bp, synthetic construct; identical to SEQ ID NO: 27986
  source 1..80: mol_type = other DNA

SEQ ID NO: 212717 - DNA, 80 bp, synthetic construct; identical to SEQ ID NO: 27987
  source 1..80: mol_type = other DNA

SEQ ID NO: 212718 - DNA, 80 bp, synthetic construct; identical to SEQ ID NO: 27988
  source 1..80: mol_type = other DNA

SEQ ID NO: 212719 - DNA, 80 bp, synthetic construct; identical to SEQ ID NO: 27989
  source 1..80: mol_type = other DNA

SEQ ID NO: 212720 - DNA, 80 bp, synthetic construct; identical to SEQ ID NO: 27990
  source 1..80: mol_type = other DNA

SEQ ID NO: 212721 - DNA, 80 bp, synthetic construct; identical to SEQ ID NO: 27991
  source 1..80: mol_type = other DNA

SEQ ID NO: 212722 - DNA, 80 bp, synthetic construct; identical to SEQ ID NO: 27992
  source 1..80: mol_type = other DNA

SEQ ID NO: 212723 - DNA, 80 bp, synthetic construct; identical to SEQ ID NO: 27993
  source 1..80: mol_type = other DNA

SEQ ID NO: 212724 - DNA, 80 bp, synthetic construct; identical to SEQ ID NO: 27994
  source 1..80: mol_type = other DNA

SEQ ID NO: 212725 - DNA, 80 bp, synthetic construct; identical to SEQ ID NO: 27995
  source 1..80: mol_type = other DNA

SEQ ID NO: 212726 - DNA, 80 bp, synthetic construct; identical to SEQ ID NO: 27996
  source 1..80: mol_type = other DNA

SEQ ID NO: 212727 - DNA, 80 bp, synthetic construct; identical to SEQ ID NO: 27997
  source 1..80: mol_type = other DNA

SEQ ID NO: 212728 - DNA, 80 bp, synthetic construct; identical to SEQ ID NO: 27998
  source 1..80: mol_type = other DNA

SEQ ID NO: 212729 - DNA, 80 bp, synthetic construct; identical to SEQ ID NO: 27999
  source 1..80: mol_type = other DNA

SEQ ID NO: 212730 - DNA, 80 bp, synthetic construct; identical to SEQ ID NO: 28000
  source 1..80: mol_type = other DNA

SEQ ID NO: 212731 - DNA, 80 bp, synthetic construct; identical to SEQ ID NO: 28001
  source 1..80: mol_type = other DNA

SEQ ID NO: 212732 - DNA, 80 bp, synthetic construct; identical to SEQ ID NO: 28002
  source 1..80: mol_type = other DNA

SEQ ID NO: 212733 - DNA, 80 bp, synthetic construct; identical to SEQ ID NO: 28003
  source 1..80: mol_type = other DNA

SEQ ID NO: 212734 - DNA, 80 bp, synthetic construct; identical to SEQ ID NO: 28004
  source 1..80: mol_type = other DNA

SEQ ID NO: 212735 - DNA, 80 bp, synthetic construct; identical to SEQ ID NO: 28005
  source 1..80: mol_type = other DNA

SEQ ID NO: 212736 - DNA, 80 bp, synthetic construct; identical to SEQ ID NO: 28006
  source 1..80: mol_type = other DNA

SEQ ID NO: 212737 - DNA, 80 bp, synthetic construct; identical to SEQ ID NO: 28007
  source 1..80: mol_type = other DNA

SEQ ID NO: 212738 - DNA, 80 bp, synthetic construct; identical to SEQ ID NO: 28008
  source 1..80: mol_type = other DNA

SEQ ID NO: 212739 - DNA, 80 bp, synthetic construct; identical to SEQ ID NO: 28009
  source 1..80: mol_type = other DNA

SEQ ID NO: 212740 - DNA, 80 bp, synthetic construct; identical to SEQ ID NO: 28010
  source 1..80: mol_type = other DNA

SEQ ID NO: 212741 - DNA, 80 bp, synthetic construct; identical to SEQ ID NO: 28011
  source 1..80: mol_type = other DNA

SEQ ID NO: 212742 - DNA, 80 bp, synthetic construct; identical to SEQ ID NO: 28012
  source 1..80: mol_type = other DNA

SEQ ID NO: 212743 - DNA, 80 bp, synthetic construct; identical to SEQ ID NO: 28013
  source 1..80: mol_type = other DNA

SEQ ID NO: 212744 - DNA, 80 bp, synthetic construct; identical to SEQ ID NO: 28014
  source 1..80: mol_type = other DNA

SEQ ID NO: 212745 - DNA, 80 bp, synthetic construct; identical to SEQ ID NO: 28015
  source 1..80: mol_type = other DNA

SEQ ID NO: 212746 - DNA, 80 bp, synthetic construct; identical to SEQ ID NO: 28016
  source 1..80: mol_type = other DNA

SEQ ID NO: 212747 - DNA, 80 bp, synthetic construct; identical to SEQ ID NO: 28017
  source 1..80: mol_type = other DNA

SEQ ID NO: 212748 - DNA, 80 bp, synthetic construct; identical to SEQ ID NO: 28018
  source 1..80: mol_type = other DNA

SEQ ID NO: 212749 - DNA, 80 bp, synthetic construct; identical to SEQ ID NO: 28019
  source 1..80: mol_type = other DNA

SEQ ID NO: 212750 - DNA, 80 bp, synthetic construct; identical to SEQ ID NO: 28020
  source 1..80: mol_type = other DNA

SEQ ID NO: 212751 - DNA, 80 bp, synthetic construct; identical to SEQ ID NO: 28021
  source 1..80: mol_type = other DNA

SEQ ID NO: 212752 - DNA, 80 bp, synthetic construct; identical to SEQ ID NO: 28022
  source 1..80: mol_type = other DNA

SEQ ID NO: 212753 - DNA, 80 bp, synthetic construct; identical to SEQ ID NO: 28023
  source 1..80: mol_type = other DNA

SEQ ID NO: 212754 - DNA, 80 bp, synthetic construct; identical to SEQ ID NO: 28024
  source 1..80: mol_type = other DNA

SEQ ID NO: 212755 - DNA, 80 bp, synthetic construct; identical to SEQ ID NO: 28025
  source 1..80: mol_type = other DNA

SEQ ID NO: 212756 - DNA, 80 bp, synthetic construct; identical to SEQ ID NO: 28026
  source 1..80: mol_type = other DNA

SEQ ID NO: 212757 - DNA, 80 bp, synthetic construct; identical to SEQ ID NO: 28027
  source 1..80: mol_type = other DNA

SEQ ID NO: 212758 - DNA, 80 bp, synthetic construct; identical to SEQ ID NO: 28028
  source 1..80: mol_type = other DNA

SEQ ID NO: 212759 - DNA, 80 bp, synthetic construct; identical to SEQ ID NO: 28029
  source 1..80: mol_type = other DNA

SEQ ID NO: 212760 - DNA, 80 bp, synthetic construct; identical to SEQ ID NO: 28030
  source 1..80: mol_type = other DNA

SEQ ID NO: 212761 - DNA, 80 bp, synthetic construct; identical to SEQ ID NO: 28031
  source 1..80: mol_type = other DNA

SEQ ID NO: 212762 - DNA, 80 bp, synthetic construct; identical to SEQ ID NO: 28032
  source 1..80: mol_type = other DNA

SEQ ID NO: 212763 - DNA, 80 bp, synthetic construct; identical to SEQ ID NO: 28033
  source 1..80: mol_type = other DNA

SEQ ID NO: 212764 - DNA, 80 bp, synthetic construct; identical to SEQ ID NO: 28034
  source 1..80: mol_type = other DNA

SEQ ID NO: 212765 - DNA, 80 bp, synthetic construct; identical to SEQ ID NO: 28035
  source 1..80: mol_type = other DNA

SEQ ID NO: 212766 - DNA, 80 bp, synthetic construct; identical to SEQ ID NO: 28036
  source 1..80: mol_type = other DNA

SEQ ID NO: 212767 - DNA, 80 bp, synthetic construct; identical to SEQ ID NO: 28037
  source 1..80: mol_type = other DNA

SEQ ID NO: 212768 - DNA, 80 bp, synthetic construct; identical to SEQ ID NO: 28038
  source 1..80: mol_type = other DNA

SEQ ID NO: 212769 - DNA, 80 bp, synthetic construct; identical to SEQ ID NO: 28039
  source 1..80: mol_type = other DNA

SEQ ID NO: 212770 - DNA, 80 bp, synthetic construct; identical to SEQ ID NO: 28040
  source 1..80: mol_type = other DNA

SEQ ID NO: 212771 - DNA, 80 bp, synthetic construct; identical to SEQ ID NO: 28041
  source 1..80: mol_type = other DNA

SEQ ID NO: 212772 - DNA, 80 bp, synthetic construct; identical to SEQ ID NO: 28042
  source 1..80: mol_type = other DNA

SEQ ID NO: 212773 - DNA, 80 bp, synthetic construct; identical to SEQ ID NO: 28043
  source 1..80: mol_type = other DNA

SEQ ID NO: 212774 - DNA, 80 bp, synthetic construct; identical to SEQ ID NO: 28044
  source 1..80: mol_type = other DNA

SEQ ID NO: 212775 - DNA, 80 bp, synthetic construct; identical to SEQ ID NO: 28045
  source 1..80: mol_type = other DNA

SEQ ID NO: 212776 - DNA, 80 bp, synthetic construct; identical to SEQ ID NO: 28046
  source 1..80: mol_type = other DNA

SEQ ID NO: 212777 - DNA, 80 bp, synthetic construct; identical to SEQ ID NO: 28047
  source 1..80: mol_type = other DNA

SEQ ID NO: 212778 - DNA, 80 bp, synthetic construct; identical to SEQ ID NO: 28048
  source 1..80: mol_type = other DNA

SEQ ID NO: 212779 - DNA, 80 bp, synthetic construct; identical to SEQ ID NO: 28049
  source 1..80: mol_type = other DNA

SEQ ID NO: 212780 - DNA, 80 bp, synthetic construct; identical to SEQ ID NO: 28050
  source 1..80: mol_type = other DNA

SEQ ID NO: 212781 - DNA, 80 bp, synthetic construct; identical to SEQ ID NO: 28051
  source 1..80: mol_type = other DNA

SEQ ID NO: 212782 - DNA, 80 bp, synthetic construct; identical to SEQ ID NO: 28052
  source 1..80: mol_type = other DNA

SEQ ID NO: 212783 - DNA, 80 bp, synthetic construct; identical to SEQ ID NO: 28053
  source 1..80: mol_type = other DNA

SEQ ID NO: 212784 - DNA, 80 bp, synthetic construct; identical to SEQ ID NO: 28054
  source 1..80: mol_type = other DNA

SEQ ID NO: 212785 - DNA, 80 bp, synthetic construct; identical to SEQ ID NO: 28055
  source 1..80: mol_type = other DNA

SEQ ID NO: 212786 - DNA, 80 bp, synthetic construct; identical to SEQ ID NO: 28056
  source 1..80: mol_type = other DNA

SEQ ID NO: 212787 - DNA, 80 bp, synthetic construct; identical to SEQ ID NO: 28057
  source 1..80: mol_type = other DNA

SEQ ID NO: 212788 - DNA, 80 bp, synthetic construct; identical to SEQ ID NO: 28058
  source 1..80: mol_type = other DNA

SEQ ID NO: 212789 - DNA, 80 bp, synthetic construct; identical to SEQ ID NO: 28059
  source 1..80: mol_type = other DNA

SEQ ID NO: 212790 - DNA, 80 bp, synthetic construct; identical to SEQ ID NO: 28060
  source 1..80: mol_type = other DNA

SEQ ID NO: 212791 - DNA, 80 bp, synthetic construct; identical to SEQ ID NO: 28061
  source 1..80: mol_type = other DNA

SEQ ID NO: 212792 - DNA, 80 bp, synthetic construct; identical to SEQ ID NO: 28062
  source 1..80: mol_type = other DNA

SEQ ID NO: 212793 - DNA, 80 bp, synthetic construct; identical to SEQ ID NO: 28063
  source 1..80: mol_type = other DNA

SEQ ID NO: 212794 - DNA, 80 bp, synthetic construct; identical to SEQ ID NO: 28064
  source 1..80: mol_type = other DNA

SEQ ID NO: 212795 - DNA, 80 bp, synthetic construct; identical to SEQ ID NO: 28065
  source 1..80: mol_type = other DNA

SEQ ID NO: 212796 - DNA, 80 bp, synthetic construct; identical to SEQ ID NO: 28066
  source 1..80: mol_type = other DNA

SEQ ID NO: 212797 - DNA, 80 bp, synthetic construct; identical to SEQ ID NO: 28067
  source 1..80: mol_type = other DNA

SEQ ID NO: 212798 - DNA, 80 bp, synthetic construct; identical to SEQ ID NO: 28068
  source 1..80: mol_type = other DNA

SEQ ID NO: 212799 - DNA, 80 bp, synthetic construct; identical to SEQ ID NO: 28069
  source 1..80: mol_type = other DNA

SEQ ID NO: 212800 - DNA, 80 bp, synthetic construct; identical to SEQ ID NO: 28070
  source 1..80: mol_type = other DNA

SEQ ID NO: 212801 - DNA, 80 bp, synthetic construct; identical to SEQ ID NO: 28071
  source 1..80: mol_type = other DNA

SEQ ID NO: 212802 - DNA, 80 bp, synthetic construct; identical to SEQ ID NO: 28072
  source 1..80: mol_type = other DNA

SEQ ID NO: 212803 - DNA, 80 bp, synthetic construct; identical to SEQ ID NO: 28073
  source 1..80: mol_type = other DNA

SEQ ID NO: 212804 - DNA, 80 bp, synthetic construct; identical to SEQ ID NO: 28074
  source 1..80: mol_type = other DNA

SEQ ID NO: 212805 - DNA, 80 bp, synthetic construct; identical to SEQ ID NO: 28075
  source 1..80: mol_type = other DNA

SEQ ID NO: 212806 - DNA, 80 bp, synthetic construct; identical to SEQ ID NO: 28076
  source 1..80: mol_type = other DNA

SEQ ID NO: 212807 - DNA, 80 bp, synthetic construct; identical to SEQ ID NO: 28077
  source 1..80: mol_type = other DNA

SEQ ID NO: 212808 - DNA, 80 bp, synthetic construct; identical to SEQ ID NO: 28078
  source 1..80: mol_type = other DNA

SEQ ID NO: 212809 - DNA, 80 bp, synthetic construct; identical to SEQ ID NO: 28079
  source 1..80: mol_type = other DNA

SEQ ID NO: 212810 - DNA, 80 bp, synthetic construct; identical to SEQ ID NO: 28080
  source 1..80: mol_type = other DNA

SEQ ID NO: 212811 - DNA, 80 bp, synthetic construct; identical to SEQ ID NO: 28081
  source 1..80: mol_type = other DNA

SEQ ID NO: 212812 - DNA, 80 bp, synthetic construct; identical to SEQ ID NO: 28082
  source 1..80: mol_type = other DNA

SEQ ID NO: 212813 - DNA, 80 bp, synthetic construct; identical to SEQ ID NO: 28083
  source 1..80: mol_type = other DNA

SEQ ID NO: 212814 - DNA, 80 bp, synthetic construct; identical to SEQ ID NO: 28084
  source 1..80: mol_type = other DNA

SEQ ID NO: 212815 - DNA, 80 bp, synthetic construct; identical to SEQ ID NO: 28085
  source 1..80: mol_type = other DNA

SEQ ID NO: 212816 - DNA, 80 bp, synthetic construct; identical to SEQ ID NO: 28086
  source 1..80: mol_type = other DNA

SEQ ID NO: 212817 - DNA, 80 bp, synthetic construct; identical to SEQ ID NO: 28087
  source 1..80: mol_type = other DNA

SEQ ID NO: 212818 - DNA, 80 bp, synthetic construct; identical to SEQ ID NO: 28088
  source 1..80: mol_type = other DNA

SEQ ID NO: 212819 - DNA, 80 bp, synthetic construct; identical to SEQ ID NO: 28089
  source 1..80: mol_type = other DNA

SEQ ID NO: 212820 - DNA, 80 bp, synthetic construct; identical to SEQ ID NO: 28090
  source 1..80: mol_type = other DNA

SEQ ID NO: 212821 - DNA, 80 bp, synthetic construct; identical to SEQ ID NO: 28091
  source 1..80: mol_type = other DNA

SEQ ID NO: 212822 - DNA, 80 bp, synthetic construct; identical to SEQ ID NO: 28092
  source 1..80: mol_type = other DNA

SEQ ID NO: 212823 - DNA, 80 bp, synthetic construct; identical to SEQ ID NO: 28093
  source 1..80: mol_type = other DNA

SEQ ID NO: 212824 - DNA, 80 bp, synthetic construct; identical to SEQ ID NO: 28094
  source 1..80: mol_type = other DNA

SEQ ID NO: 212825 - DNA, 80 bp, synthetic construct; identical to SEQ ID NO: 28095
  source 1..80: mol_type = other DNA

SEQ ID NO: 212826 - DNA, 80 bp, synthetic construct; identical to SEQ ID NO: 28096
  source 1..80: mol_type = other DNA

SEQ ID NO: 212827 - DNA, 80 bp, synthetic construct; identical to SEQ ID NO: 28097
  source 1..80: mol_type = other DNA

SEQ ID NO: 212828 - DNA, 80 bp, synthetic construct; identical to SEQ ID NO: 28098
  source 1..80: mol_type = other DNA

SEQ ID NO: 212829 - DNA, 80 bp, synthetic construct; identical to SEQ ID NO: 28099
  source 1..80: mol_type = other DNA

SEQ ID NO: 212830 - DNA, 80 bp, synthetic construct; identical to SEQ ID NO: 28100
  source 1..80: mol_type = other DNA

SEQ ID NO: 212831 - DNA, 80 bp, synthetic construct; identical to SEQ ID NO: 28101
  source 1..80: mol_type = other DNA

SEQ ID NO: 212832 - DNA, 80 bp, synthetic construct; identical to SEQ ID NO: 28102
  source 1..80: mol_type = other DNA

SEQ ID NO: 212833 - DNA, 80 bp, synthetic construct; identical to SEQ ID NO: 28103
  source 1..80: mol_type = other DNA

SEQ ID NO: 212834 - DNA, 80 bp, synthetic construct; identical to SEQ ID NO: 28104
  source 1..80: mol_type = other DNA

SEQ ID NO: 212835 - DNA, 80 bp, synthetic construct; identical to SEQ ID NO: 28105
  source 1..80: mol_type = other DNA

SEQ ID NO: 212836 - DNA, 80 bp, synthetic construct; identical to SEQ ID NO: 28106
  source 1..80: mol_type = other DNA

SEQ ID NO: 212837 - DNA, 80 bp, synthetic construct; identical to SEQ ID NO: 28107
  source 1..80: mol_type = other DNA

SEQ ID NO: 212838 - DNA, 80 bp, synthetic construct; identical to SEQ ID NO: 28108
  source 1..80: mol_type = other DNA

SEQ ID NO: 212839 - DNA, 80 bp, synthetic construct; identical to SEQ ID NO: 28109
  source 1..80: mol_type = other DNA

SEQ ID NO: 212840 - DNA, 80 bp, synthetic construct; identical to SEQ ID NO: 28110
  source 1..80: mol_type = other DNA

SEQ ID NO: 212841 - DNA, 80 bp, synthetic construct; identical to SEQ ID NO: 28111
  source 1..80: mol_type = other DNA

SEQ ID NO: 212842 - DNA, 80 bp, synthetic construct; identical to SEQ ID NO: 28112
  source 1..80: mol_type = other DNA

SEQ ID NO: 212843 - DNA, 80 bp, synthetic construct; identical to SEQ ID NO: 28113
  source 1..80: mol_type = other DNA

SEQ ID NO: 212844 - DNA, 80 bp, synthetic construct; identical to SEQ ID NO: 28114
  source 1..80: mol_type = other DNA

SEQ ID NO: 212845 - DNA, 80 bp, synthetic construct; identical to SEQ ID NO: 28115
  source 1..80: mol_type = other DNA

SEQ ID NO: 212846 - DNA, 80 bp, synthetic construct; identical to SEQ ID NO: 28116
  source 1..80: mol_type = other DNA

SEQ ID NO: 212847 - DNA, 80 bp, synthetic construct; identical to SEQ ID NO: 28117
  source 1..80: mol_type = other DNA

SEQ ID NO: 212848 - DNA, 80 bp, synthetic construct; identical to SEQ ID NO: 28118
  source 1..80: mol_type = other DNA

SEQ ID NO: 212849 - DNA, 80 bp, synthetic construct; identical to SEQ ID NO: 28119
  source 1..80: mol_type = other DNA

SEQ ID NO: 212850 - DNA, 80 bp, synthetic construct; identical to SEQ ID NO: 28120
  source 1..80: mol_type = other DNA

SEQ ID NO: 212851 - DNA, 80 bp, synthetic construct; identical to SEQ ID NO: 28121
  source 1..80: mol_type = other DNA

SEQ ID NO: 212852 - DNA, 80 bp, synthetic construct; identical to SEQ ID NO: 28122
  source 1..80: mol_type = other DNA

SEQ ID NO: 212853 - DNA, 80 bp, synthetic construct; identical to SEQ ID NO: 28123
  source 1..80: mol_type = other DNA

SEQ ID NO: 212854 - DNA, 80 bp, synthetic construct; identical to SEQ ID NO: 28124
  source 1..80: mol_type = other DNA

SEQ ID NO: 212855 - DNA, 80 bp, synthetic construct; identical to SEQ ID NO: 28125
  source 1..80: mol_type = other DNA

SEQ ID NO: 212856 - DNA, 80 bp, synthetic construct; identical to SEQ ID NO: 28126
  source 1..80: mol_type = other DNA

SEQ ID NO: 212857 - DNA, 80 bp, synthetic construct; identical to SEQ ID NO: 28127
  source 1..80: mol_type = other DNA

SEQ ID NO: 212858 - DNA, 80 bp, synthetic construct; identical to SEQ ID NO: 28128
  source 1..80: mol_type = other DNA

SEQ ID NO: 212859 - DNA, 80 bp, synthetic construct; identical to SEQ ID NO: 28129
  source 1..80: mol_type = other DNA

SEQ ID NO: 212860 - DNA, 80 bp, synthetic construct; identical to SEQ ID NO: 28130
  source 1..80: mol_type = other DNA

SEQ ID NO: 212861 - DNA, 80 bp, synthetic construct; identical to SEQ ID NO: 28131
  source 1..80: mol_type = other DNA

SEQ ID NO: 212862 - DNA, 80 bp, synthetic construct; identical to SEQ ID NO: 28132
  source 1..80: mol_type = other DNA

SEQ ID NO: 212863 - DNA, 80 bp, synthetic construct; identical to SEQ ID NO: 28133
  source 1..80: mol_type = other DNA

SEQ ID NO: 212864 - DNA, 80 bp, synthetic construct; identical to SEQ ID NO: 28134
  source 1..80: mol_type = other DNA

SEQ ID NO: 212865 - DNA, 80 bp, synthetic construct; identical to SEQ ID NO: 28135
  source 1..80: mol_type = other DNA

SEQ ID NO: 212866 - DNA, 80 bp, synthetic construct; identical to SEQ ID NO: 28136
  source 1..80: mol_type = other DNA

SEQ ID NO: 212867 - DNA, 80 bp, synthetic construct; identical to SEQ ID NO: 28137
  source 1..80: mol_type = other DNA

SEQ ID NO: 212868 - DNA, 80 bp, synthetic construct; identical to SEQ ID NO: 28138
  source 1..80: mol_type = other DNA

SEQ ID NO: 212869 - DNA, 80 bp, synthetic construct; identical to SEQ ID NO: 28139
  source 1..80: mol_type = other DNA

SEQ ID NO: 212870 - DNA, 80 bp, synthetic construct; identical to SEQ ID NO: 28140
  source 1..80: mol_type = other DNA

SEQ ID NO: 212871 - DNA, 80 bp, synthetic construct; identical to SEQ ID NO: 28141
  source 1..80: mol_type = other DNA

SEQ ID NO: 212872 - DNA, 80 bp, synthetic construct; identical to SEQ ID NO: 28142
  source 1..80: mol_type = other DNA

SEQ ID NO: 212873 - DNA, 80 bp, synthetic construct; identical to SEQ ID NO: 28143
  source 1..80: mol_type = other DNA

SEQ ID NO: 212874 - DNA, 80 bp, synthetic construct; identical to SEQ ID NO: 28144
  source 1..80: mol_type = other DNA

SEQ ID NO: 212875 - DNA, 80 bp, synthetic construct; identical to SEQ ID NO: 28145
  source 1..80: mol_type = other DNA

SEQ ID NO: 212876 - DNA, 80 bp, synthetic construct; identical to SEQ ID NO: 28146
  source 1..80: mol_type = other DNA

SEQ ID NO: 212877 - DNA, 80 bp, synthetic construct; identical to SEQ ID NO: 28147
  source 1..80: mol_type = other DNA

SEQ ID NO: 212878 - DNA, 80 bp, synthetic construct; identical to SEQ ID NO: 28148
  source 1..80: mol_type = other DNA

SEQ ID NO: 212879 - DNA, 80 bp, synthetic construct; identical to SEQ ID NO: 28149
  source 1..80: mol_type = other DNA

SEQ ID NO: 212880 - DNA, 80 bp, synthetic construct; identical to SEQ ID NO: 28150
  source 1..80: mol_type = other DNA

SEQ ID NO: 212881 - DNA, 80 bp, synthetic construct; identical to SEQ ID NO: 28151
  source 1..80: mol_type = other DNA

SEQ ID NO: 212882 - DNA, 80 bp, synthetic construct; identical to SEQ ID NO: 28152
  source 1..80: mol_type = other DNA

SEQ ID NO: 212883 - DNA, 80 bp, synthetic construct; identical to SEQ ID NO: 28153
  source 1..80: mol_type = other DNA

SEQ ID NO: 212884 - DNA, 80 bp, synthetic construct; identical to SEQ ID NO: 28154
  source 1..80: mol_type = other DNA

SEQ ID NO: 212885 - DNA, 80 bp, synthetic construct; identical to SEQ ID NO: 28155
  source 1..80: mol_type = other DNA

SEQ ID NO: 212886 - DNA, 80 bp, synthetic construct; identical to SEQ ID NO: 28156
  source 1..80: mol_type = other DNA

SEQ ID NO: 212887 - DNA, 80 bp, synthetic construct; identical to SEQ ID NO: 28157
  source 1..80: mol_type = other DNA

SEQ ID NO: 212888 - DNA, 80 bp, synthetic construct; identical to SEQ ID NO: 28158
  source 1..80: mol_type = other DNA

SEQ ID NO: 212889 - DNA, 80 bp, synthetic construct; identical to SEQ ID NO: 28159
  source 1..80: mol_type = other DNA

SEQ ID NO: 212890 - DNA, 80 bp, synthetic construct; identical to SEQ ID NO: 28160
  source 1..80: mol_type = other DNA

SEQ ID NO: 212891 - DNA, 80 bp, synthetic construct; identical to SEQ ID NO: 28161
  source 1..80: mol_type = other DNA

SEQ ID NO: 212892 - DNA, 80 bp, synthetic construct; identical to SEQ ID NO: 28162
  source 1..80: mol_type = other DNA

SEQ ID NO: 212893 - DNA, 80 bp, synthetic construct; identical to SEQ ID NO: 28163
  source 1..80: mol_type = other DNA

SEQ ID NO: 212894 - DNA, 80 bp, synthetic construct; identical to SEQ ID NO: 28164
  source 1..80: mol_type = other DNA

SEQ ID NO: 212895 - DNA, 80 bp, synthetic construct; identical to SEQ ID NO: 28165
  source 1..80: mol_type = other DNA

SEQ ID NO: 212896 - DNA, 80 bp, synthetic construct; identical to SEQ ID NO: 28166
  source 1..80: mol_type = other DNA

SEQ ID NO: 212897 - DNA, 80 bp, synthetic construct; identical to SEQ ID NO: 28167
  source 1..80: mol_type = other DNA

SEQ ID NO: 212898 - DNA, 80 bp, synthetic construct; identical to SEQ ID NO: 28168
  source 1..80: mol_type = other DNA

SEQ ID NO: 212899 - DNA, 80 bp, synthetic construct; identical to SEQ ID NO: 28169
  source 1..80: mol_type = other DNA

SEQ ID NO: 212900 - DNA, 80 bp, synthetic construct; identical to SEQ ID NO: 28170
  source 1..80: mol_type = other DNA

SEQ ID NO: 212901 - DNA, 80 bp, synthetic construct; identical to SEQ ID NO: 28171
  source 1..80: mol_type = other DNA

SEQ ID NO: 212902 - DNA, 80 bp, synthetic construct; identical to SEQ ID NO: 28172
  source 1..80: mol_type = other DNA

SEQ ID NO: 212903 - DNA, 80 bp, synthetic construct; identical to SEQ ID NO: 28173
  source 1..80: mol_type = other DNA

SEQ ID NO: 212904 - DNA, 80 bp, synthetic construct; identical to SEQ ID NO: 28174
  source 1..80: mol_type = other DNA

SEQ ID NO: 212905 - DNA, 80 bp, synthetic construct; identical to SEQ ID NO: 28175
  source 1..80: mol_type = other DNA

SEQ ID NO: 212906 - DNA, 80 bp, synthetic construct; identical to SEQ ID NO: 28176
  source 1..80: mol_type = other DNA

SEQ ID NO: 212907 - DNA, 80 bp, synthetic construct; identical to SEQ ID NO: 28177
  source 1..80: mol_type = other DNA

SEQ ID NO: 212908 - DNA, 80 bp, synthetic construct; identical to SEQ ID NO: 28178
  source 1..80: mol_type = other DNA

SEQ ID NO: 212909 - DNA, 80 bp, synthetic construct; identical to SEQ ID NO: 28179
  source 1..80: mol_type = other DNA

SEQ ID NO: 212910 - DNA, 80 bp, synthetic construct; identical to SEQ ID NO: 28180
  source 1..80: mol_type = other DNA

SEQ ID NO: 212911 - DNA, 80 bp, synthetic construct; identical to SEQ ID NO: 28181
  source 1..80: mol_type = other DNA

SEQ ID NO: 212912 - DNA, 80 bp, synthetic construct; identical to SEQ ID NO: 28182
  source 1..80: mol_type = other DNA

SEQ ID NO: 212913 - DNA, 80 bp, synthetic construct; identical to SEQ ID NO: 28183
  source 1..80: mol_type = other DNA

SEQ ID NO: 212914 - DNA, 80 bp, synthetic construct; identical to SEQ ID NO: 28184
  source 1..80: mol_type = other DNA

SEQ ID NO: 212915 - DNA, 80 bp, synthetic construct; identical to SEQ ID NO: 28185
  source 1..80: mol_type = other DNA

SEQ ID NO: 212916 - DNA, 80 bp, synthetic construct; identical to SEQ ID NO: 28186
  source 1..80: mol_type = other DNA

SEQ ID NO: 212917 - DNA, 80 bp, synthetic construct; identical to SEQ ID NO: 28187
  source 1..80: mol_type = other DNA

SEQ ID NO: 212918 - DNA, 80 bp, synthetic construct; identical to SEQ ID NO: 28188
  source 1..80: mol_type = other DNA

SEQ ID NO: 212919 - DNA, 80 bp, synthetic construct; identical to SEQ ID NO: 28189
  source 1..80: mol_type = other DNA

SEQ ID NO: 212920 - DNA, 80 bp, synthetic construct; identical to SEQ ID NO: 28190
  source 1..80: mol_type = other DNA

SEQ ID NO: 212921 - DNA, 80 bp, synthetic construct; identical to SEQ ID NO: 28191
  source 1..80: mol_type = other DNA

SEQ ID NO: 212922 - DNA, 80 bp, synthetic construct; identical to SEQ ID NO: 28192
  source 1..80: mol_type = other DNA

SEQ ID NO: 212923 - DNA, 80 bp, synthetic construct; identical to SEQ ID NO: 28193
  source 1..80: mol_type = other DNA

SEQ ID NO: 212924 - DNA, 80 bp, synthetic construct; identical to SEQ ID NO: 28194
  source 1..80: mol_type = other DNA

SEQ ID NO: 212925 - DNA, 80 bp, synthetic construct; identical to SEQ ID NO: 28195
  source 1..80: mol_type = other DNA

SEQ ID NO: 212926 - DNA, 80 bp, synthetic construct; identical to SEQ ID NO: 28196
  source 1..80: mol_type = other DNA

SEQ ID NO: 212927 - DNA, 80 bp, synthetic construct; identical to SEQ ID NO: 28197
  source 1..80: mol_type = other DNA

SEQ ID NO: 212928 - DNA, 80 bp, synthetic construct; identical to SEQ ID NO: 28198
  source 1..80: mol_type = other DNA

SEQ ID NO: 212929 - DNA, 80 bp, synthetic construct; identical to SEQ ID NO: 28199
  source 1..80: mol_type = other DNA

SEQ ID NO: 212930 - DNA, 80 bp, synthetic construct; identical to SEQ ID NO: 28200
  source 1..80: mol_type = other DNA

SEQ ID NO: 212931 - DNA, 80 bp, synthetic construct; identical to SEQ ID NO: 28201
  source 1..80: mol_type = other DNA

SEQ ID NO: 212932 - DNA, 80 bp, synthetic construct; identical to SEQ ID NO: 28202
  source 1..80: mol_type = other DNA

SEQ ID NO: 212933 - DNA, 80 bp, synthetic construct; identical to SEQ ID NO: 28203
  source 1..80: mol_type = other DNA

SEQ ID NO: 212934 - DNA, 80 bp, synthetic construct; identical to SEQ ID NO: 28204
  source 1..80: mol_type = other DNA

SEQ ID NO: 212935 - DNA, 80 bp, synthetic construct; identical to SEQ ID NO: 28205
  source 1..80: mol_type = other DNA

SEQ ID NO: 212936 - DNA, 80 bp, synthetic construct; identical to SEQ ID NO: 28206
  source 1..80: mol_type = other DNA

SEQ ID NO: 212937 - DNA, 80 bp, synthetic construct; identical to SEQ ID NO: 28207
  source 1..80: mol_type = other DNA

SEQ ID NO: 212938 - DNA, 80 bp, synthetic construct; identical to SEQ ID NO: 28208
  source 1..80: mol_type = other DNA

SEQ ID NO: 212939 - DNA, 80 bp, synthetic construct; identical to SEQ ID NO: 28209
  source 1..80: mol_type = other DNA

SEQ ID NO: 212940 - DNA, 80 bp, synthetic construct; identical to SEQ ID NO: 28210
  source 1..80: mol_type = other DNA

SEQ ID NO: 212941 - DNA, 80 bp, synthetic construct; identical to SEQ ID NO: 28211
  source 1..80: mol_type = other DNA

SEQ ID NO: 212942 - DNA, 80 bp, synthetic construct; identical to SEQ ID NO: 28212
  source 1..80: mol_type = other DNA

SEQ ID NO: 212943 - DNA, 80 bp, synthetic construct; identical to SEQ ID NO: 28213
  source 1..80: mol_type = other DNA

SEQ ID NO: 212944 - DNA, 80 bp, synthetic construct; identical to SEQ ID NO: 28214
  source 1..80: mol_type = other DNA

SEQ ID NO: 212945 - DNA, 80 bp, synthetic construct; identical to SEQ ID NO: 28215
  source 1..80: mol_type = other DNA

SEQ ID NO: 212946 - DNA, 80 bp, synthetic construct; identical to SEQ ID NO: 28216
  source 1..80: mol_type = other DNA

SEQ ID NO: 212947 - DNA, 80 bp, synthetic construct; identical to SEQ ID NO: 28217
  source 1..80: mol_type = other DNA

SEQ ID NO: 212948 - DNA, 80 bp, synthetic construct; identical to SEQ ID NO: 28218
  source 1..80: mol_type = other DNA

SEQ ID NO: 212949 - DNA, 80 bp, synthetic construct; identical to SEQ ID NO: 28219
  source 1..80: mol_type = other DNA

SEQ ID NO: 212950 - DNA, 80 bp, synthetic construct; identical to SEQ ID NO: 28220
  source 1..80: mol_type = other DNA

SEQ ID NO: 212951 - DNA, 80 bp, synthetic construct; identical to SEQ ID NO: 28221
  source 1..80: mol_type = other DNA

SEQ ID NO: 212952 - DNA, 80 bp, synthetic construct; identical to SEQ ID NO: 28222
  source 1..80: mol_type = other DNA

SEQ ID NO: 212953 - DNA, 80 bp, synthetic construct; identical to SEQ ID NO: 28223
  source 1..80: mol_type = other DNA

SEQ ID NO: 212954 - DNA, 80 bp, synthetic construct; identical to SEQ ID NO: 28224
  source 1..80: mol_type = other DNA

SEQ ID NO: 212955 - DNA, 80 bp, synthetic construct; identical to SEQ ID NO: 28225
  source 1..80: mol_type = other DNA

SEQ ID NO: 212956 - DNA, 80 bp, synthetic construct; identical to SEQ ID NO: 28226
  source 1..80: mol_type = other DNA

SEQ ID NO: 212957 - DNA, 80 bp, synthetic construct; identical to SEQ ID NO: 28227
  source 1..80: mol_type = other DNA

SEQ ID NO: 212958 - DNA, 80 bp, synthetic construct; identical to SEQ ID NO: 28228
  source 1..80: mol_type = other DNA

SEQ ID NO: 212959 - DNA, 80 bp, synthetic construct; identical to SEQ ID NO: 28229
  source 1..80: mol_type = other DNA

SEQ ID NO: 212960 - DNA, 80 bp, synthetic construct; identical to SEQ ID NO: 28230
  source 1..80: mol_type = other DNA

SEQ ID NO: 212961 - DNA, 80 bp, synthetic construct; identical to SEQ ID NO: 28231
  source 1..80: mol_type = other DNA

SEQ ID NO: 212962 - DNA, 80 bp, synthetic construct; identical to SEQ ID NO: 28232
  source 1..80: mol_type = other DNA

SEQ ID NO: 212963 - DNA, 80 bp, synthetic construct; identical to SEQ ID NO: 28233
  source 1..80: mol_type = other DNA

SEQ ID NO: 212964 - DNA, 80 bp, synthetic construct; identical to SEQ ID NO: 28234
  source 1..80: mol_type = other DNA

SEQ ID NO: 212965 - DNA, 80 bp, synthetic construct; identical to SEQ ID NO: 28235
  source 1..80: mol_type = other DNA

SEQ ID NO: 212966 - DNA, 80 bp, synthetic construct; identical to SEQ ID NO: 28236
  source 1..80: mol_type = other DNA

SEQ ID NO: 212967 - DNA, 80 bp, synthetic construct; identical to SEQ ID NO: 28237
  source 1..80: mol_type = other DNA

SEQ ID NO: 212968 - DNA, 80 bp, synthetic construct; identical to SEQ ID NO: 28238
  source 1..80: mol_type = other DNA

SEQ ID NO: 212969 - DNA, 80 bp, synthetic construct; identical to SEQ ID NO: 28239
  source 1..80: mol_type = other DNA

SEQ ID NO: 212970 - DNA, 80 bp, synthetic construct; identical to SEQ ID NO: 28240
  source 1..80: mol_type = other DNA

SEQ ID NO: 212971 - DNA, 80 bp, synthetic construct; identical to SEQ ID NO: 28241
  source 1..80: mol_type = other DNA

SEQ ID NO: 212972 - DNA, 80 bp, synthetic construct; identical to SEQ ID NO: 28242
  source 1..80: mol_type = other DNA

SEQ ID NO: 212973 - DNA, 80 bp, synthetic construct; identical to SEQ ID NO: 28243
  source 1..80: mol_type = other DNA

SEQ ID NO: 212974 - DNA, 80 bp, synthetic construct; identical to SEQ ID NO: 28244
  source 1..80: mol_type = other DNA

SEQ ID NO: 212975 - DNA, 80 bp, synthetic construct; identical to SEQ ID NO: 28245
  source 1..80: mol_type = other DNA

SEQ ID NO: 212976 - DNA, 80 bp, synthetic construct; identical to SEQ ID NO: 28246
  source 1..80: mol_type = other DNA

SEQ ID NO: 212977 - DNA, 80 bp, synthetic construct; identical to SEQ ID NO: 28247
  source 1..80: mol_type = other DNA

SEQ ID NO: 212978 - DNA, 80 bp, synthetic construct; identical to SEQ ID NO: 28248
  source 1..80: mol_type = other DNA

SEQ ID NO: 212979 - DNA, 80 bp, synthetic construct; identical to SEQ ID NO: 28249
  source 1..80: mol_type = other DNA

SEQ ID NO: 212980 - DNA, 80 bp, synthetic construct; identical to SEQ ID NO: 28250
  source 1..80: mol_type = other DNA

SEQ ID NO: 212981 - DNA, 80 bp, synthetic construct; identical to SEQ ID NO: 28251
  source 1..80: mol_type = other DNA

SEQ ID NO: 212982 - DNA, 80 bp, synthetic construct; identical to SEQ ID NO: 28252
  source 1..80: mol_type = other DNA

SEQ ID NO: 212983 - DNA, 80 bp, synthetic construct; identical to SEQ ID NO: 28253
  source 1..80: mol_type = other DNA

SEQ ID NO: 212984 - DNA, 80 bp, synthetic construct; identical to SEQ ID NO: 28254
  source 1..80: mol_type = other DNA

SEQ ID NO: 212985 - DNA, 80 bp, synthetic construct; identical to SEQ ID NO: 28255
  source 1..80: mol_type = other DNA

SEQ ID NO: 212986 - DNA, 80 bp, synthetic construct; identical to SEQ ID NO: 28256
  source 1..80: mol_type = other DNA

SEQ ID NO: 212987 - DNA, 80 bp, synthetic construct; identical to SEQ ID NO: 28257
  source 1..80: mol_type = other DNA

SEQ ID NO: 212988 - DNA, 80 bp, synthetic construct; identical to SEQ ID NO: 28258
  source 1..80: mol_type = other DNA

SEQ ID NO: 212989 - DNA, 80 bp, synthetic construct; identical to SEQ ID NO: 28259
  source 1..80: mol_type = other DNA

SEQ ID NO: 212990 - DNA, 80 bp, synthetic construct; identical to SEQ ID NO: 28260
  source 1..80: mol_type = other DNA

SEQ ID NO: 212991 - DNA, 80 bp, synthetic construct; identical to SEQ ID NO: 28261
  source 1..80: mol_type = other DNA

SEQ ID NO: 212992 - DNA, 80 bp, synthetic construct; identical to SEQ ID NO: 28262
  source 1..80: mol_type = other DNA

SEQ ID NO: 212993 - DNA, 80 bp, synthetic construct; identical to SEQ ID NO: 28263
  source 1..80: mol_type = other DNA

SEQ ID NO: 212994 - DNA, 80 bp, synthetic construct; identical to SEQ ID NO: 28264
  source 1..80: mol_type = other DNA

SEQ ID NO: 212995 - DNA, 80 bp, synthetic construct; identical to SEQ ID NO: 28265
  source 1..80: mol_type = other DNA

SEQ ID NO: 212996 - DNA, 80 bp, synthetic construct; identical to SEQ ID NO: 28266
  source 1..80: mol_type = other DNA

SEQ ID NO: 212997 - DNA, 80 bp, synthetic construct; identical to SEQ ID NO: 28267
  source 1..80: mol_type = other DNA

SEQ ID NO: 212998 - DNA, 80 bp, synthetic construct; identical to SEQ ID NO: 28268
  source 1..80: mol_type = other DNA

SEQ ID NO: 212999 - DNA, 80 bp, synthetic construct; identical to SEQ ID NO: 28269
  source 1..80: mol_type = other DNA

SEQ ID NO: 213000 - DNA, 80 bp, synthetic construct; identical to SEQ ID NO: 28270
  source 1..80: mol_type = other DNA

SEQ ID NO: 213001 - DNA, 80 bp, synthetic construct; identical to SEQ ID NO: 28271
  source 1..80: mol_type = other DNA

SEQ ID NO: 213002 - DNA, 80 bp, synthetic construct; identical to SEQ ID NO: 28272
  source 1..80: mol_type = other DNA

SEQ ID NO: 213003 - DNA, 80 bp, synthetic construct; identical to SEQ ID NO: 28273
  source 1..80: mol_type = other DNA

SEQ ID NO: 213004 - DNA, 80 bp, synthetic construct; identical to SEQ ID NO: 28274
  source 1..80: mol_type = other DNA

SEQ ID NO: 213005 - DNA, 80 bp, synthetic construct; identical to SEQ ID NO: 28275
  source 1..80: mol_type = other DNA

SEQ ID NO: 213006 - DNA, 80 bp, synthetic construct; identical to SEQ ID NO: 28276
  source 1..80: mol_type = other DNA

SEQ ID NO: 213007 - DNA, 80 bp, synthetic construct; identical to SEQ ID NO: 28277
  source 1..80: mol_type = other DNA

SEQ ID NO: 213008 - DNA, 80 bp, synthetic construct; identical to SEQ ID NO: 28278
  source 1..80: mol_type = other DNA

SEQ ID NO: 213009 - DNA, 80 bp, synthetic construct; identical to SEQ ID NO: 28279
  source 1..80: mol_type = other DNA

SEQ ID NO: 213010 - DNA, 80 bp, synthetic construct; identical to SEQ ID NO: 28280
  source 1..80: mol_type = other DNA

SEQ ID NO: 213011 - DNA, 80 bp, synthetic construct; identical to SEQ ID NO: 28281
  source 1..80: mol_type = other DNA

SEQ ID NO: 213012 - DNA, 80 bp, synthetic construct; identical to SEQ ID NO: 28282
  source 1..80: mol_type = other DNA

SEQ ID NO: 213013 - DNA, 80 bp, synthetic construct; identical to SEQ ID NO: 28283
  source 1..80: mol_type = other DNA

SEQ ID NO: 213014 - DNA, 80 bp, synthetic construct; identical to SEQ ID NO: 28284
  source 1..80: mol_type = other DNA

SEQ ID NO: 213015 - DNA, 80 bp, synthetic construct; identical to SEQ ID NO: 28285
  source 1..80: mol_type = other DNA

SEQ ID NO: 213016 - DNA, 80 bp, synthetic construct; identical to SEQ ID NO: 28286
  source 1..80: mol_type = other DNA

SEQ ID NO: 213017 - DNA, 80 bp, synthetic construct; identical to SEQ ID NO: 28287
  source 1..80: mol_type = other DNA

SEQ ID NO: 213018 - DNA, 80 bp, synthetic construct; identical to SEQ ID NO: 28288
  source 1..80: mol_type = other DNA

SEQ ID NO: 213019 - DNA, 80 bp, synthetic construct; identical to SEQ ID NO: 28289
  source 1..80: mol_type = other DNA

SEQ ID NO: 213020 - DNA, 80 bp, synthetic construct; identical to SEQ ID NO: 28290
  source 1..80: mol_type = other DNA

SEQ ID NO: 213021 - DNA, 80 bp, synthetic construct; identical to SEQ ID NO: 28291
  source 1..80: mol_type = other DNA

SEQ ID NO: 213022 - DNA, 80 bp, synthetic construct; identical to SEQ ID NO: 28292
  source 1..80: mol_type = other DNA

SEQ ID NO: 213023 - DNA, 80 bp, synthetic construct; identical to SEQ ID NO: 28293
  source 1..80: mol_type = other DNA

SEQ ID NO: 213024 - DNA, 80 bp, synthetic construct; identical to SEQ ID NO: 28294
  source 1..80: mol_type = other DNA

SEQ ID NO: 213025 - DNA, 80 bp, synthetic construct; identical to SEQ ID NO: 28295
  source 1..80: mol_type = other DNA

SEQ ID NO: 213026 - DNA, 80 bp, synthetic construct; identical to SEQ ID NO: 28296
  source 1..80: mol_type = other DNA

SEQ ID NO: 213027 - DNA, 80 bp, synthetic construct; identical to SEQ ID NO: 28297
  source 1..80: mol_type = other DNA

SEQ ID NO: 213028 - DNA, 80 bp, synthetic construct; identical to SEQ ID NO: 28298
  source 1..80: mol_type = other DNA

SEQ ID NO: 213029 - DNA, 80 bp, synthetic construct; identical to SEQ ID NO: 28299
  source 1..80: mol_type = other DNA

SEQ ID NO: 213030 - DNA, 80 bp, synthetic construct; identical to SEQ ID NO: 28300
  source 1..80: mol_type = other DNA

SEQ ID NO: 213031 - DNA, 80 bp, synthetic construct; identical to SEQ ID NO: 28301
  source 1..80: mol_type = other DNA

SEQ ID NO: 213032 - DNA, 80 bp, synthetic construct; identical to SEQ ID NO: 28302
  source 1..80: mol_type = other DNA

SEQ ID NO: 213033 - DNA, 80 bp, synthetic construct; identical to SEQ ID NO: 28303
  source 1..80: mol_type = other DNA

SEQ ID NO: 213034 - DNA, 80 bp, synthetic construct; identical to SEQ ID NO: 28304
  source 1..80: mol_type = other DNA

SEQ ID NO: 213035 - DNA, 80 bp, synthetic construct; identical to SEQ ID NO: 28305
  source 1..80: mol_type = other DNA

SEQ ID NO: 213036 - DNA, 80 bp, synthetic construct; identical to SEQ ID NO: 28306
  source 1..80: mol_type = other DNA

SEQ ID NO: 213037 - DNA, 80 bp, synthetic construct; identical to SEQ ID NO: 28307
  source 1..80: mol_type = other DNA

SEQ ID NO: 213038 - DNA, 80 bp, synthetic construct; identical to SEQ ID NO: 28308
  source 1..80: mol_type = other DNA

SEQ ID NO: 213039 - DNA, 80 bp, synthetic construct; identical to SEQ ID NO: 28309
  source 1..80: mol_type = other DNA

SEQ ID NO: 213040 - DNA, 80 bp, synthetic construct; identical to SEQ ID NO: 28310
  source 1..80: mol_type = other DNA

SEQ ID NO: 213041 - DNA, 80 bp, synthetic construct; identical to SEQ ID NO: 28311
  source 1..80: mol_type = other DNA

SEQ ID NO: 213042 - DNA, 80 bp, synthetic construct; identical to SEQ ID NO: 28312
  source 1..80: mol_type = other DNA

SEQ ID NO: 213043 - DNA, 80 bp, synthetic construct; identical to SEQ ID NO: 28313
  source 1..80: mol_type = other DNA

SEQ ID NO: 213044 - DNA, 80 bp, synthetic construct; identical to SEQ ID NO: 28314
  source 1..80: mol_type = other DNA

SEQ ID NO: 213045 - DNA, 80 bp, synthetic construct; identical to SEQ ID NO: 28315
  source 1..80: mol_type = other DNA

SEQ ID NO: 213046 - DNA, 80 bp, synthetic construct; identical to SEQ ID NO: 28316
  source 1..80: mol_type = other DNA

SEQ ID NO: 213047 - DNA, 80 bp, synthetic construct; identical to SEQ ID NO: 28317
  source 1..80: mol_type = other DNA

SEQ ID NO: 213048 - DNA, 80 bp, synthetic construct; identical to SEQ ID NO: 28318
  source 1..80: mol_type = other DNA

SEQ ID NO: 213049 - DNA, 80 bp, synthetic construct; identical to SEQ ID NO: 28319
  source 1..80: mol_type = other DNA

SEQ ID NO: 213050 - DNA, 80 bp, synthetic construct; identical to SEQ ID NO: 28320
  source 1..80: mol_type = other DNA

SEQ ID NO: 213051 - DNA, 80 bp, synthetic construct; identical to SEQ ID NO: 28321
  source 1..80: mol_type = other DNA

SEQ ID NO: 213052 - DNA, 80 bp, synthetic construct; identical to SEQ ID NO: 28322
  source 1..80: mol_type = other DNA

SEQ ID NO: 213053 - DNA, 80 bp, synthetic construct; identical to SEQ ID NO: 28323
  source 1..80: mol_type = other DNA

SEQ ID NO: 213054 - DNA, 80 bp, synthetic construct; identical to SEQ ID NO: 28324
  source 1..80: mol_type = other DNA

SEQ ID NO: 213055 - DNA, 80 bp, synthetic construct; identical to SEQ ID NO: 28325
  source 1..80: mol_type = other DNA

SEQ ID NO: 213056 - DNA, 80 bp, synthetic construct; identical to SEQ ID NO: 28326
  source 1..80: mol_type = other DNA

SEQ ID NO: 213057 - DNA, 80 bp, synthetic construct; identical to SEQ ID NO: 28327
  source 1..80: mol_type = other DNA

SEQ ID NO: 213058 - DNA, 80 bp, synthetic construct; identical to SEQ ID NO: 28328
  source 1..80: mol_type = other DNA

SEQ ID NO: 213059 - DNA, 80 bp, synthetic construct; identical to SEQ ID NO: 28329
  source 1..80: mol_type = other DNA

SEQ ID NO: 213060 - DNA, 80 bp, synthetic construct; identical to SEQ ID NO: 28330
  source 1..80: mol_type = other DNA

SEQ ID NO: 213061 - DNA, 80 bp, synthetic construct; identical to SEQ ID NO: 28331
  source 1..80: mol_type = other DNA

SEQ ID NO: 213062 - DNA, 80 bp, synthetic construct; identical to SEQ ID NO: 28332
  source 1..80: mol_type = other DNA

SEQ ID NO: 213063 - DNA, 80 bp, synthetic construct; identical to SEQ ID NO: 28333
  source 1..80: mol_type = other DNA

SEQ ID NO: 213064 - DNA, 80 bp, synthetic construct; identical to SEQ ID NO: 28334
  source 1..80: mol_type = other DNA

SEQ ID NO: 213065 - DNA, 80 bp, synthetic construct; identical to SEQ ID NO: 28335
  source 1..80: mol_type = other DNA

SEQ ID NO: 213066 - DNA, 80 bp, synthetic construct; identical to SEQ ID NO: 28336
  source 1..80: mol_type = other DNA

SEQ ID NO: 213067 - DNA, 80 bp, synthetic construct; identical to SEQ ID NO: 28337
  source 1..80: mol_type = other DNA

SEQ ID NO: 213068 - DNA, 80 bp, synthetic construct; identical to SEQ ID NO: 28338
  source 1..80: mol_type = other DNA

SEQ ID NO: 213069 - DNA, 80 bp, synthetic construct; identical to SEQ ID NO: 28339
  source 1..80: mol_type = other DNA

SEQ ID NO: 213070 - DNA, 80 bp, synthetic construct; identical to SEQ ID NO: 28340
  source 1..80: mol_type = other DNA

SEQ ID NO: 213071 - DNA, 80 bp, synthetic construct; identical to SEQ ID NO: 28341
  source 1..80: mol_type = other DNA

SEQ ID NO: 213072 - DNA, 80 bp, synthetic construct; identical to SEQ ID NO: 28342
  source 1..80: mol_type = other DNA

SEQ ID NO: 213073 - DNA, 80 bp, synthetic construct; identical to SEQ ID NO: 28343
  source 1..80: mol_type = other DNA

SEQ ID NO: 213074 - DNA, 80 bp, synthetic construct; identical to SEQ ID NO: 28344
  source 1..80: mol_type = other DNA

SEQ ID NO: 213075 - DNA, 80 bp, synthetic construct; identical to SEQ ID NO: 28345
  source 1..80: mol_type = other DNA

SEQ ID NO: 213076 - DNA, 80 bp, synthetic construct; identical to SEQ ID NO: 28346
  source 1..80: mol_type = other DNA

SEQ ID NO: 213077 - DNA, 80 bp, synthetic construct; identical to SEQ ID NO: 28347
  source 1..80: mol_type = other DNA

SEQ ID NO: 213078 - DNA, 80 bp, synthetic construct; identical to SEQ ID NO: 28348
  source 1..80: mol_type = other DNA

SEQ ID NO: 213079 - DNA, 80 bp, synthetic construct; identical to SEQ ID NO: 28349
  source 1..80: mol_type = other DNA

SEQ ID NO: 213080 - DNA, 80 bp, synthetic construct; identical to SEQ ID NO: 28350
  source 1..80: mol_type = other DNA

SEQ ID NO: 213081 - DNA, 80 bp, synthetic construct; identical to SEQ ID NO: 28351
  source 1..80: mol_type = other DNA

SEQ ID NO: 213082 - DNA, 80 bp, synthetic construct; identical to SEQ ID NO: 28352
  source 1..80: mol_type = other DNA

SEQ ID NO: 213083 - DNA, 80 bp, synthetic construct; identical to SEQ ID NO: 28353
  source 1..80: mol_type = other DNA

SEQ ID NO: 213084 - DNA, 80 bp, synthetic construct; identical to SEQ ID NO: 28354
  source 1..80: mol_type = other DNA

SEQ ID NO: 213085 - DNA, 80 bp, synthetic construct; identical to SEQ ID NO: 28355
  source 1..80: mol_type = other DNA

SEQ ID NO: 213086 - DNA, 80 bp, synthetic construct; identical to SEQ ID NO: 28356
  source 1..80: mol_type = other DNA

SEQ ID NO: 213087 - DNA, 80 bp, synthetic construct; identical to SEQ ID NO: 28357
  source 1..80: mol_type = other DNA

SEQ ID NO: 213088 - DNA, 80 bp, synthetic construct; identical to SEQ ID NO: 28358
  source 1..80: mol_type = other DNA

SEQ ID NO: 213089 - DNA, 80 bp, synthetic construct; identical to SEQ ID NO: 28359
  source 1..80: mol_type = other DNA

SEQ ID NO: 213090 - DNA, 80 bp, synthetic construct; identical to SEQ ID NO: 28360
  source 1..80: mol_type = other DNA

SEQ ID NO: 213091 - DNA, 80 bp, synthetic construct; identical to SEQ ID NO: 28361
  source 1..80: mol_type = other DNA

SEQ ID NO: 213092 - DNA, 80 bp, synthetic construct; identical to SEQ ID NO: 28362
  source 1..80: mol_type = other DNA

SEQ ID NO: 213093 - DNA, 80 bp, synthetic construct; identical to SEQ ID NO: 28363
  source 1..80: mol_type = other DNA

SEQ ID NO: 213094 - DNA, 80 bp, synthetic construct; identical to SEQ ID NO: 28364
  source 1..80: mol_type = other DNA

SEQ ID NO: 213095 - DNA, 80 bp, synthetic construct; identical to SEQ ID NO: 28365
  source 1..80: mol_type = other DNA

SEQ ID NO: 213096 - DNA, 80 bp, synthetic construct; identical to SEQ ID NO: 28366
  source 1..80: mol_type = other DNA

SEQ ID NO: 213097 - DNA, 80 bp, synthetic construct; identical to SEQ ID NO: 28367
  source 1..80: mol_type = other DNA

SEQ ID NO: 213098 - DNA, 80 bp, synthetic construct; identical to SEQ ID NO: 28368
  source 1..80: mol_type = other DNA

SEQ ID NO: 213099 - DNA, 80 bp, synthetic construct; identical to SEQ ID NO: 28369
  source 1..80: mol_type = other DNA

SEQ ID NO: 213100 - DNA, 80 bp, synthetic construct; identical to SEQ ID NO: 28370
  source 1..80: mol_type = other DNA

SEQ ID NO: 213101 - DNA, 80 bp, synthetic construct; identical to SEQ ID NO: 28371
  source 1..80: mol_type = other DNA

SEQ ID NO: 213102 - DNA, 80 bp, synthetic construct; identical to SEQ ID NO: 28372
  source 1..80: mol_type = other DNA

SEQ ID NO: 213103 - DNA, 80 bp, synthetic construct; identical to SEQ ID NO: 28373
  source 1..80: mol_type = other DNA

SEQ ID NO: 213104 - DNA, 80 bp, synthetic construct; identical to SEQ ID NO: 28374
  source 1..80: mol_type = other DNA

SEQ ID NO: 213105 - DNA, 80 bp, synthetic construct; identical to SEQ ID NO: 28375
  source 1..80: mol_type = other DNA

SEQ ID NO: 213106 - DNA, 80 bp, synthetic construct; identical to SEQ ID NO: 28376
  source 1..80: mol_type = other DNA

SEQ ID NO: 213107 - DNA, 80 bp, synthetic construct; identical to SEQ ID NO: 28377
  source 1..80: mol_type = other DNA

SEQ ID NO: 213108 - DNA, 80 bp, synthetic construct; identical to SEQ ID NO: 28378
  source 1..80: mol_type = other DNA

SEQ ID NO: 213109 - DNA, 80 bp, synthetic construct; identical to SEQ ID NO: 28379
  source 1..80: mol_type = other DNA

SEQ ID NO: 213110 - DNA, 80 bp, synthetic construct; identical to SEQ ID NO: 28380
  source 1..80: mol_type = other DNA

SEQ ID NO: 213111 - DNA, 80 bp, synthetic construct; identical to SEQ ID NO: 28381
  source 1..80: mol_type = other DNA

SEQ ID NO: 213112 - DNA, 80 bp, synthetic construct; identical to SEQ ID NO: 28382
  source 1..80: mol_type = other DNA

SEQ ID NO: 213113 - DNA, 80 bp, synthetic construct; identical to SEQ ID NO: 28383
  source 1..80: mol_type = other DNA

SEQ ID NO: 213114 - DNA, 80 bp, synthetic construct; identical to SEQ ID NO: 28384
  source 1..80: mol_type = other DNA

SEQ ID NO: 213115 - DNA, 80 bp, synthetic construct; identical to SEQ ID NO: 28385
  source 1..80: mol_type = other DNA

SEQ ID NO: 213116 - DNA, 80 bp, synthetic construct; identical to SEQ ID NO: 28386
  source 1..80: mol_type = other DNA

SEQ ID NO: 213117 - DNA, 80 bp, synthetic construct; identical to SEQ ID NO: 28387
  source 1..80: mol_type = other DNA

SEQ ID NO: 213118 - DNA, 80 bp, synthetic construct; identical to SEQ ID NO: 28388
  source 1..80: mol_type = other DNA

SEQ ID NO: 213119 - DNA, 80 bp, synthetic construct; identical to SEQ ID NO: 28389
  source 1..80: mol_type = other DNA

SEQ ID NO: 213120 - DNA, 80 bp, synthetic construct; identical to SEQ ID NO: 28390
  source 1..80: mol_type = other DNA

SEQ ID NO: 213121 - DNA, 80 bp, synthetic construct; identical to SEQ ID NO: 28391
  source 1..80: mol_type = other DNA

SEQ ID NO: 213122 - DNA, 80 bp, synthetic construct; identical to SEQ ID NO: 28392
  source 1..80: mol_type = other DNA

SEQ ID NO: 213123 - DNA, 80 bp, synthetic construct; identical to SEQ ID NO: 28393
  source 1..80: mol_type = other DNA

SEQ ID NO: 213124 - DNA, 80 bp, synthetic construct; identical to SEQ ID NO: 28394
  source 1..80: mol_type = other DNA

SEQ ID NO: 213125 - DNA, 80 bp, synthetic construct; identical to SEQ ID NO: 28395
  source 1..80: mol_type = other DNA

SEQ ID NO: 213126 - DNA, 80 bp, synthetic construct; identical to SEQ ID NO: 28396
  source 1..80: mol_type = other DNA

SEQ ID NO: 213127 - DNA, 80 bp, synthetic construct; identical to SEQ ID NO: 28397
  source 1..80: mol_type = other DNA

SEQ ID NO: 213128 - DNA, 80 bp, synthetic construct; identical to SEQ ID NO: 28398
  source 1..80: mol_type = other DNA

SEQ ID NO: 213129 - DNA, 80 bp, synthetic construct; identical to SEQ ID NO: 28399
  source 1..80: mol_type = other DNA

SEQ ID NO: 213130 - DNA, 80 bp, synthetic construct; identical to SEQ ID NO: 28400
  source 1..80: mol_type = other DNA

SEQ ID NO: 213131 - DNA, 80 bp, synthetic construct; identical to SEQ ID NO: 28401
  source 1..80: mol_type = other DNA

SEQ ID NO: 213132 - DNA, 80 bp, synthetic construct; identical to SEQ ID NO: 28402
  source 1..80: mol_type = other DNA

SEQ ID NO: 213133 - DNA, 80 bp, synthetic construct; identical to SEQ ID NO: 28403
  source 1..80: mol_type = other DNA

SEQ ID NO: 213134 - DNA, 80 bp, synthetic construct; identical to SEQ ID NO: 28404
  source 1..80: mol_type = other DNA

SEQ ID NO: 213135 - DNA, 80 bp, synthetic construct; identical to SEQ ID NO: 28405
  source 1..80: mol_type = other DNA

SEQ ID NO: 213136 - DNA, 80 bp, synthetic construct; identical to SEQ ID NO: 28406
  source 1..80: mol_type = other DNA

SEQ ID NO: 213137 - DNA, 80 bp, synthetic construct; identical to SEQ ID NO: 28407
  source 1..80: mol_type = other DNA

SEQ ID NO: 213138 - DNA, 80 bp, synthetic construct; identical to SEQ ID NO: 28408
  source 1..80: mol_type = other DNA

SEQ ID NO: 213139 - DNA, 80 bp, synthetic construct; identical to SEQ ID NO: 28409
  source 1..80: mol_type = other DNA

SEQ ID NO: 213140 - DNA, 80 bp, synthetic construct; identical to SEQ ID NO: 28410
  source 1..80: mol_type = other DNA

SEQ ID NO: 213141 - DNA, 80 bp, synthetic construct; identical to SEQ ID NO: 28411
  source 1..80: mol_type = other DNA

SEQ ID NO: 213142 - DNA, 80 bp, synthetic construct; identical to SEQ ID NO: 28412
  source 1..80: mol_type = other DNA

SEQ ID NO: 213143 - DNA, 80 bp, synthetic construct; identical to SEQ ID NO: 28413
  source 1..80: mol_type = other DNA

SEQ ID NO: 213144 - DNA, 80 bp, synthetic construct; identical to SEQ ID NO: 28414
  source 1..80: mol_type = other DNA

SEQ ID NO: 213145 - DNA, 80 bp, synthetic construct; identical to SEQ ID NO: 28415
  source 1..80: mol_type = other DNA

SEQ ID NO: 213146 - DNA, 80 bp, synthetic construct; identical to SEQ ID NO: 28416
  source 1..80: mol_type = other DNA

SEQ ID NO: 213147 - DNA, 80 bp, synthetic construct; identical to SEQ ID NO: 28417
  source 1..80: mol_type = other DNA

SEQ ID NO: 213148 - DNA, 80 bp, synthetic construct; identical to SEQ ID NO: 28418
  source 1..80: mol_type = other DNA

SEQ ID NO: 213149 - DNA, 80 bp, synthetic construct; identical to SEQ ID NO: 28419
  source 1..80: mol_type = other DNA

SEQ ID NO: 213150 - DNA, 80 bp, synthetic construct; identical to SEQ ID NO: 28420
  source 1..80: mol_type = other DNA

SEQ ID NO: 213151 - DNA, 80 bp, synthetic construct; identical to SEQ ID NO: 28421
  source 1..80: mol_type = other DNA

SEQ ID NO: 213152 - DNA, 80 bp, synthetic construct; identical to SEQ ID NO: 28422
  source 1..80: mol_type = other DNA

SEQ ID NO: 213153 - DNA, 80 bp, synthetic construct; identical to SEQ ID NO: 28423
  source 1..80: mol_type = other DNA

SEQ ID NO: 213154 - DNA, 80 bp, synthetic construct; identical to SEQ ID NO: 28424
  source 1..80: mol_type = other DNA

SEQ ID NO: 213155 - DNA, 80 bp, synthetic construct; identical to SEQ ID NO: 28425
  source 1..80: mol_type = other DNA

SEQ ID NO: 213156 - DNA, 80 bp, synthetic construct; identical to SEQ ID NO: 28426
  source 1..80: mol_type = other DNA

SEQ ID NO: 213157 - DNA, 80 bp, synthetic construct; identical to SEQ ID NO: 28427
  source 1..80: mol_type = other DNA

SEQ ID NO: 213158 - DNA, 80 bp, synthetic construct; identical to SEQ ID NO: 28428
  source 1..80: mol_type = other DNA

SEQ ID NO: 213159 - DNA, 80 bp, synthetic construct; identical to SEQ ID NO: 28429
  source 1..80: mol_type = other DNA

SEQ ID NO: 213160 - DNA, 80 bp, synthetic construct; identical to SEQ ID NO: 28430
  source 1..80: mol_type = other DNA

SEQ ID NO: 213161 - DNA, 80 bp, synthetic construct; identical to SEQ ID NO: 28431
  source 1..80: mol_type = other DNA

SEQ ID NO: 213162 - DNA, 80 bp, synthetic construct; identical to SEQ ID NO: 28432
  source 1..80: mol_type = other DNA

SEQ ID NO: 213163 - DNA, 80 bp, synthetic construct; identical to SEQ ID NO: 28433
  source 1..80: mol_type = other DNA

SEQ ID NO: 213164 - DNA, 80 bp, synthetic construct; identical to SEQ ID NO: 28434
  source 1..80: mol_type = other DNA

SEQ ID NO: 213165 - DNA, 80 bp, synthetic construct; identical to SEQ ID NO: 28435
  source 1..80: mol_type = other DNA

SEQ ID NO: 213166 - DNA, 80 bp, synthetic construct; identical to SEQ ID NO: 28436
  source 1..80: mol_type = other DNA

SEQ ID NO: 213167 - DNA, 80 bp, synthetic construct; identical to SEQ ID NO: 28437
  source 1..80: mol_type = other DNA

SEQ ID NO: 213168 - DNA, 80 bp, synthetic construct; identical to SEQ ID NO: 28438
  source 1..80: mol_type = other DNA

SEQ ID NO: 213169 - DNA, 80 bp, synthetic construct; identical to SEQ ID NO: 28439
  source 1..80: mol_type = other DNA

SEQ ID NO: 213170 - DNA, 80 bp, synthetic construct; identical to SEQ ID NO: 28440
  source 1..80: mol_type = other DNA

SEQ ID NO: 213171 - DNA, 80 bp, synthetic construct; identical to SEQ ID NO: 28441
  source 1..80: mol_type = other DNA

SEQ ID NO: 213172 - DNA, 80 bp, synthetic construct; identical to SEQ ID NO: 28442
  source 1..80: mol_type = other DNA

SEQ ID NO: 213173 - DNA, 80 bp, synthetic construct; identical to SEQ ID NO: 28443
  source 1..80: mol_type = other DNA

SEQ ID NO: 213174 - DNA, 80 bp, synthetic construct; identical to SEQ ID NO: 28444
  source 1..80: mol_type = other DNA

SEQ ID NO: 213175 - DNA, 80 bp, synthetic construct; identical to SEQ ID NO: 28445
  source 1..80: mol_type = other DNA

SEQ ID NO: 213176 - DNA, 80 bp, synthetic construct; identical to SEQ ID NO: 28446
  source 1..80: mol_type = other DNA

SEQ ID NO: 213177 - DNA, 80 bp, synthetic construct; identical to SEQ ID NO: 28447
  source 1..80: mol_type = other DNA

SEQ ID NO: 213178 - DNA, 80 bp, synthetic construct; identical to SEQ ID NO: 28448
  source 1..80: mol_type = other DNA

SEQ ID NO: 213179 - DNA, 80 bp, synthetic construct; identical to SEQ ID NO: 28449
  source 1..80: mol_type = other DNA

SEQ ID NO: 213180 - DNA, 80 bp, synthetic construct; identical to SEQ ID NO: 28450
  source 1..80: mol_type = other DNA

SEQ ID NO: 213181 - DNA, 80 bp, synthetic construct; identical to SEQ ID NO: 28451
  source 1..80: mol_type = other DNA

SEQ ID NO: 213182 - DNA, 80 bp, synthetic construct; identical to SEQ ID NO: 28452
  source 1..80: mol_type = other DNA

SEQ ID NO: 213183 - DNA, 80 bp, synthetic construct
  source 1..80: mol_type = other DNA
gtattaaattcgagtatgaagagtggaaagtgccttatgtaattccggcgagcaatcacacttacactccagacttctta

SEQ ID NO: 213184 - DNA, 80 bp, synthetic construct
  source 1..80: mol_type = other DNA
cttccaaacggtatattcgttgagacaaagggtctgtgggaaagcgatgatagaaagaagcacttattaattagggagca

SEQ ID NO: 213185 - DNA, 80 bp, synthetic construct
  source 1..80: mol_type = other DNA
ctgagtggataaaggaacccaagaaggaggtcccctttgatagattaaaaaggaaaggaggaaagaaataatggctcgtg

SEQ ID NO: 213186 - DNA, 80 bp, synthetic construct
  source 1..80: mol_type = other DNA
gcaccccgagctagacatccgtattgtcttctcaagctcacgtactaagttatacaaaggttctccaacgtcttatggag

SEQ ID NO: 213187 - DNA, 80 bp, synthetic construct
  source 1..80: mol_type = other DNA
agttctgcgaaaagcatggtattaagttcgctgataaactgatacctgctgagtggataaaggaacccaagaaggaggtc

SEQ ID NO: 213188 - DNA, 80 bp, synthetic construct
  source 1..80: mol_type = other DNA
cggcgctaaaggaatccgaaaggttggagcgtttcgctctggcctagaggacaaggtttcaaagcagttggaatcaaaag

SEQ ID NO: 213189 - DNA, 80 bp, synthetic construct
  source 1..80: mol_type = other DNA
tattttcctttaagcgcctttacaaccgggcctgttgctggtttacctaaagaaacccataactcgtgtatttcgctttt

SEQ ID NO: 213190 - DNA, 80 bp, synthetic construct
  source 1..80: mol_type = other DNA
aagtggttcatgccaatgcggtgcttttctttgcgcccttgaagttccttctgaaatctttttatttccgccattcgaat

SEQ ID NO: 213191 - DNA, 80 bp, synthetic construct
  source 1..80: mol_type = other DNA
aaaactttttcattacttcagattgccgagcttttctttctgccctattttgggctatacgttgtgaattcttcatccga

SEQ ID NO: 213192 - DNA, 80 bp, synthetic construct
  source 1..80: mol_type = other DNA
gtttttgtttcaggattgtttaatctaagtttatgttctaatcgttgttgctcagtccattttcttccttctccaccctg

SEQ ID NO: 213193 - DNA, 80 bp, synthetic construct
  source 1..80: mol_type = other DNA
accaccaggagaaatattaatgcaagtatctgggtgtttacgttttaatgcagatattagctcacgttcaacttcatatg

SEQ ID NO: 213194 - DNA, 80 bp, synthetic construct
  source 1..80: mol_type = other DNA
aaaagacgcctttcggcgtcctaacttttactatatatgttctataaaatttttgtttaatatccattatcttgacgttc

SEQ ID NO: 213195 - DNA, 80 bp, synthetic construct
  source 1..80: mol_type = other DNA
atttttctctagaaccatggcattttgaccatcgtattttataattaaatccatacttacgatatatgttccatagtatt

SEQ ID NO: 213196 - DNA, 80 bp, synthetic construct
  source 1..80: mol_type = other DNA
ttacctgaacccggatatttatcattatatggatttacaataaatgattcatgtttcccagcgtaccaaaagacgccttt

SEQ ID NO: 213197 - DNA, 80 bp, synthetic construct
  source 1..80: mol_type = other DNA
atttaaattacatgattatttatacatcttcttttctgaataagtaaattaaattcttaagagccgaacttgttacatca

SEQ ID NO: 213198 - DNA, 80 bp, synthetic construct
  source 1..80: mol_type = other DNA
ggctaggtggatgcggtaggtccgaatataaggatggagactttgacattcttgcggttgtggttgacgaagatgtgctt

SEQ ID NO: 213199 - DNA, 80 bp, synthetic construct
  source 1..80: mol_type = other DNA
attttcacatgggacgaagtaaaaggtaagacatccatgtgtgtcggcaagagaaacaaaggcataaaactataggagaa

SEQ ID NO: 213200 - DNA, 80 bp, synthetic construct
  source 1..80: mol_type = other DNA
taaggatggtaaatttagtaaggttcaggttaaaacagccacaacggttcaaaccaacacaggagatgccaagcaggtta

SEQ ID NO: 213201 - DNA, 80 bp, synthetic construct
  source 1..80: mol_type = other DNA
cgacattaagacccatttcagaaataactttaaaaagataaatagtttcagaagatggaacagttttaaaattaataaca

SEQ ID NO: 213202 - DNA, 80 bp, synthetic construct
  source 1..80: mol_type = other DNA
aaaatatcatgttgaatagaaagcatctctttacgcaaaacatcactgtgttttaactcattgactctatcaatgagttc

SEQ ID NO: 213203 - DNA, 80 bp, synthetic construct
  source 1..80: mol_type = other DNA
agcacgattatttacataaaaacgagcatcattaataattcgatgtttggtatcaaattcttcgtcaattagcatcactg

SEQ ID NO: 213204 - DNA, 80 bp, synthetic construct
  source 1..80: mol_type = other DNA
catcagatgccattgtttcccagacgcgtaaggtaataaagttgtcattataattcttgtcaccaataattaatgcagca

SEQ ID NO: 213205 - DNA, 80 bp, synthetic construct
  source 1..80: mol_type = other DNA
atagcttgactattcttttcagataccatgttcataggaatttttccagtgaacaccggagctttggtccaaggatattt

SEQ ID NO: 213206 - DNA, 80 bp, synthetic construct
  source 1..80: mol_type = other DNA
aggatttttaaactgtttttctcgtgcattgccaaaaaactcaatatttaaaccggtgtcaaataagaattctaccatct

SEQ ID NO: 213207 - DNA, 80 bp, synthetic construct
  source 1..80: mol_type = other DNA
tggattcgcgttgaccggaccgaaatgaaccgccataaataacatccaaagttttcttggtaggcttagataattgaaaa

SEQ ID NO: 213208 - DNA, 80 bp, synthetic construct
  source 1..80: mol_type = other DNA
tcgttcatatgaattttatattgttcaataggaaaatattcaaattcaataacattatcaactttcttatgcgcagcctt

SEQ ID NO: 213209 - DNA, 80 bp, synthetic construct
  source 1..80: mol_type = other DNA
agcaatgtctaaatttataccttgggaaatcactttaattggtgatttaattaatagctcttcttcagtgtacaaatatg

SEQ ID NO: 213210 - DNA, 80 bp, synthetic construct
  source 1..80: mol_type = other DNA
taatagttcataatttttataaatcaatagcttttttgaacgcatcttgccattcggctttctttgcacgggttttattt

SEQ ID NO: 213211 - DNA, 80 bp, synthetic construct
  source 1..80: mol_type = other DNA
cccatggtctatttttaacatttggccaagactgcgaaaacggcaaacgtatatctgtaaataaataataaattttactt

SEQ ID NO: 213212 - DNA, 80 bp, synthetic construct
  source 1..80: mol_type = other DNA
ttgtattttgccataaatttttgcgcagataaaattgctaaattaggtttaccgccaaaaaagttaatagaagaattaac

SEQ ID NO: 213213 - DNA, 80 bp, synthetic construct
  source 1..80: mol_type = other DNA
agataaatagtttcagaagatggaacagttttaaaattaataacattattacccatattaattatagcaattttcatatt

SEQ ID NO: 213214 - DNA, 80 bp, synthetic construct
  source 1..80: mol_type = other DNA
aactatcaaacggtcataatcattaacatctacttcatcaaaagatttagtgtaaacaccatttttaagagaaataatgt

SEQ ID NO: 213215 - DNA, 80 bp, synthetic construct
  source 1..80: mol_type = other DNA
aggtgtggtctggtagtgctggcggtggggtaagtgtgactgtttcacaggatctccgcttccgcaatatctggattaag

SEQ ID NO: 213216 - DNA, 80 bp, synthetic construct
  source 1..80: mol_type = other DNA
agacagtcgttcagtacctaatgcaatcatggtggagaacgagtaattggtaaatcacaaggaaagacgtgtagtccacg

SEQ ID NO: 213217 - DNA, 80 bp, synthetic construct
  source 1..80: mol_type = other DNA
tgtgccaacaactcttggaacttcttccgtactggccccgatggaatctacttcatagcctctgatggtggatggttacg

SEQ ID NO: 213218 - DNA, 80 bp, synthetic construct
  source 1..80: mol_type = other DNA
attccaaatacactccaacggtctcggattcaagaatattgcagacagtcgttcagtacctaatgcaatcatggtggaga

SEQ ID NO: 213219 - DNA, 80 bp, synthetic construct
  source 1..80: mol_type = other DNA
tcaaggtactaagtggggaggtaaatggctggatgcttacctacgtgacagcttcgttgcgaagtccaaggcgtggactc

SEQ ID NO: 213220 - DNA, 80 bp, synthetic construct
  source 1..80: mol_type = other DNA
ttgtttagttgcattagacatcctagagggctttcctatgttatcagaataataatatttccattgaaatcctccagcgg

SEQ ID NO: 213221 - DNA, 80 bp, synthetic construct
  source 1..80: mol_type = other DNA
ttttccttttaccatctacacattgtttaattgaagttgaacagctatatgacatatcttctgcagcatctgtaatacat

SEQ ID NO: 213222 - DNA, 80 bp, synthetic construct
  source 1..80: mol_type = other DNA
ctatatttgcgaataaaatttccatttaaatcatattgataaattggttttccagcatttcgtctagcgttagacatgta

SEQ ID NO: 213223 - DNA, 80 bp, synthetic construct
  source 1..80: mol_type = other DNA
ttttttattatcatcatctttccagaactctttcatgctttccgatattgaagaagatacagctgttttaatccatccat

SEQ ID NO: 213224 - DNA, 80 bp, synthetic construct
  source 1..80: mol_type = other DNA
acattttattatttagtcttgttccgtcagaactataacacatcatacgaatagctaaagccaatttaggaagtctataa

SEQ ID NO: 213225 - DNA, 80 bp, synthetic construct
  source 1..80: mol_type = other DNA
attttaaataataataaatgcgcggtaaaatgttcttctggtgtcaaaagaactaaattagttttatcatctgtaccacc

SEQ ID NO: 213226 - DNA, 80 bp, synthetic construct
  source 1..80: mol_type = other DNA
aataattttccagtagtatcatattgaaatactggcacatttcttttctgagttatcccacgtttagatttagacatttt

SEQ ID NO: 213227 - DNA, 80 bp, synthetic construct
  source 1..80: mol_type = other DNA
tggcagggcgctacgaacaataaagggtacgggcaggtgtggtgcagcaataccggaaaggttgtctactgtcatcgcgt

SEQ ID NO: 213228 - DNA, 80 bp, synthetic construct
  source 1..80: mol_type = other DNA
acatggtaaataagggtcgctcacacaaggggtataaactttcagacgaagacgtaatggcaatcatggagtccagcgag

SEQ ID NO: 213229 - DNA, 80 bp, synthetic construct
  source 1..80: mol_type = other DNA
aatgtctaatgctccgaaaggttctaccgtcctgcactcctgtgataatccattatgttgtaaccctgaacacctatcca

SEQ ID NO: 213230 - DNA, 80 bp, synthetic construct
  source 1..80: mol_type = other DNA
taggaactccaaaagagaactccactgacatggtaaataagggtcgctcacacaaggggtataaactttcagacgaagac

SEQ ID NO: 213231 - DNA, 80 bp, synthetic construct
  source 1..80: mol_type = other DNA
acgaagacggagacttctaagtggaactgcgggagaaaatccttgagcgaatcaaggtgacttcctctgggtgttgggag

SEQ ID NO: 213232 - DNA, 80 bp, synthetic construct
  source 1..80: mol_type = other DNA
cacagtgacgactttacagcaattgcttacttaagggacgaattgctcacaaagcatccgaccttaggttctggtaatga

SEQ ID NO: 213233 - DNA, 80 bp, synthetic construct
  source 1..80: mol_type = other DNA
atatggttttacataaacgatgcacgtttggcatggttgtcgtctctaggtatcttgaacccactaggtatagtgtggga

SEQ ID NO: 213234 - DNA, 80 bp, synthetic construct
  source 1..80: mol_type = other DNA
ggttcacatttgagctagagtccatgatattctgggcaatagtcaaagcgacccaaatccattttggtaacgccggaacc

SEQ ID NO: 213235 - DNA, 80 bp, synthetic construct
  source 1..80: mol_type = other DNA
cagcccgcctacggcagtctcggtatacaccaagactccgtacgggcggctgctcgcggatacccgtacctcgggtttcc

SEQ ID NO: 213236 - DNA, 80 bp, synthetic construct
  source 1..80: mol_type = other DNA
cgaggcgacccgtcgtaccttagctatcgctaagctacgggaggcgaatgatcggtgcggtcagataaatagagaaggtt

SEQ ID NO: 213237 - DNA, 80 bp, synthetic construct
  source 1..80: mol_type = other DNA
aaaggtgcctttctcattcgttgtcgactggctcctacctgtaggtaacatgctcgagggccttacggcccccgtgggat

SEQ ID NO: 213238 - DNA, 80 bp, synthetic construct
  source 1..80: mol_type = other DNA
ataggcatctacggggacgatattatatgtcccagtgagattgcaccccgtgtgctagaggcacttgcctactacggttt

SEQ ID NO: 213239 - DNA, 80 bp, synthetic construct
  source 1..80: mol_type = other DNA
gtcttgctcgtatcgctcgagaacgcaagttcttcagcgaaaagcacgacagtggtcgctacatagcgtggttccatact

SEQ ID NO: 213240 - DNA, 80 bp, synthetic construct
  source 1..80: mol_type = other DNA
aatctcttcgccctgatgctgatattaaatcggctacggggttggggagttgtcggaggtatgtcagatccacgcctcta

SEQ ID NO: 213241 - DNA, 80 bp, synthetic construct
  source 1..80: mol_type = other DNA
tcttacatgacaaatccttgtcatgggatccggatgttttacaaaccagcatccgtagccttattggcaacctcctctct

SEQ ID NO: 213242 - DNA, 80 bp, synthetic construct
  source 1..80: mol_type = other DNA
gctcctacatgtcaggaacagttactgacgtaataacgggtgagtccatcataagcgttgacgctccctacgggtggact

SEQ ID NO: 213243 - DNA, 80 bp, synthetic construct
  source 1..80: mol_type = other DNA
taaaccgaatcttcgtaaaacgttcgtgtccgggctctttcgcgagagctgcggcgcgcacttttaccgtggtgtcgatg

SEQ ID NO: 213244 - DNA, 80 bp, synthetic construct
  source 1..80: mol_type = other DNA
ggaggtgaaatcaccgacagcatgaagtccgccggcgtgcgcgttatacgcacttcggagtggctaacgccggttcccac

SEQ ID NO: 213245 - DNA, 80 bp, synthetic construct
  source 1..80: mol_type = other DNA
cggcccagggacctccccctaaagagaggacccgggattctcccgatttggtaactagctgcttggctagttaccaccca

SEQ ID NO: 213246 - DNA, 80 bp, synthetic construct
  source 1..80: mol_type = other DNA
ggctaccgatcgtcgttgtttgggcaatgcacgttctccaacggtgcctctatggggcacaagttgcaggatgcagcgcc

SEQ ID NO: 213247 - DNA, 80 bp, synthetic construct
  source 1..80: mol_type = other DNA
gtggagagacagggcactgctaaggcccaaatctcagccatgcatcgaggggtacaatccgtatggccaacaactggcgc

SEQ ID NO: 213248 - DNA, 80 bp, synthetic construct
  source 1..80: mol_type = other DNA
tcaaaccgttttacatcaagaaacctgttgacaatctcttcgccctgatgctgatattaaatcggctacggggttgggga

SEQ ID NO: 213249 - DNA, 80 bp, synthetic construct
  source 1..80: mol_type = other DNA
attccctcaggagtgtgggccagcgagctctcctcggtagctgaccgagggacccccgtaaacggggtgggtgtgctcga

SEQ ID NO: 213250 - DNA, 80 bp, synthetic construct
  source 1..80: mol_type = other DNA
attccctcaggagtgtgggccagcgagctctcctcggtagctgaccgagggacccccgtaaacggcgtgggtgtgctcga

SEQ ID NO: 213251 - DNA, 80 bp, synthetic construct
  source 1..80: mol_type = other DNA
agtcatatgaatttaggctcgttgtagggaacggagtgtttacagttccgaagaataataaaatagatcgggctgcctgt

SEQ ID NO: 213252 - DNA, 80 bp, synthetic construct
  source 1..80: mol_type = other DNA
ttacaagaagttcgctgaacaagcaaccgttaccccccgcgctctgagagcggctctattggtccgagaccaatgtgcgc

SEQ ID NO: 213253 - DNA, 80 bp, synthetic construct
  source 1..80: mol_type = other DNA
gtacgtaaagtctcctttctcgatggtccataccttagatgcgttagcattaatcaggcaacggctctctagatagagcc

SEQ ID NO: 213254 - DNA, 80 bp, synthetic construct
  source 1..80: mol_type = other DNA
aagagcacgggtccgcgaaagcggtggctccaccgaaaggtgggcgggcttcggcccagggacctccccctaaagagagg

SEQ ID NO: 213255 - DNA, 80 bp, synthetic construct
  source 1..80: mol_type = other DNA
aagagcacgggtccgcgaaagcggtggctccaccgaaaggtgtgcgggcttcggcccagggacctccccctaaagagagg

SEQ ID NO: 213256 - DNA, 80 bp, synthetic construct
  source 1..80: mol_type = other DNA
cgtggatcagacacgcggtccgctataacgagtcatatgaatttaggctcgttgtagggaacggagtgtttacagttccg

SEQ ID NO: 213257 - DNA, 80 bp, synthetic construct
  source 1..80: mol_type = other DNA
ctcaaccggagtttgaagcatggcttctaactttactcagttcgttctcgtcgacaatggcggaactggcgacgtgactg

SEQ ID NO: 213258 - DNA, 80 bp, synthetic construct
  source 1..80: mol_type = other DNA
tcgccccaagcaacttcgctaacggggtcgctgaatggatcagctctaactcgcgttcacaggcttacaaagtaacctgt

SEQ ID NO: 213259 - DNA, 80 bp, synthetic construct
  source 1..80: mol_type = other DNA
agcgttcgtcagagctctgcgcagaatcgcaaatacaccatcaaagtcgaggtgcctaaagtggcaacccagactgttgg

SEQ ID NO: 213260 - DNA, 80 bp, synthetic construct
  source 1..80: mol_type = other DNA
tatgtattgatcttcctcgcgatctttctctcgaaatttaccaatcaattgcttctgtcgctactggaagcggtgatccg

SEQ ID NO: 213261 - DNA, 80 bp, synthetic construct
  source 1..80: mol_type = other DNA
ctaacatcaagttagatggccgtctgtcgtatccagctgcaaacttccagacaacgtgcaacatatcgcgacgtatcgtg

SEQ ID NO: 213262 - DNA, 80 bp, synthetic construct
  source 1..80: mol_type = other DNA
tctcgatcgtatccgctcacactacggaatcgtagatggcgagacgatacgatgggaactattttccacaatgggaaatg

SEQ ID NO: 213263 - DNA, 80 bp, synthetic construct
  source 1..80: mol_type = other DNA
aaggtgtgggtacggctctcctcccaggtgccttcgatgttcttcggtgggacggacctcgctgccgactactacgtagt

SEQ ID NO: 213264 - DNA, 80 bp, synthetic construct
  source 1..80: mol_type = other DNA
tggtgtagagcttcctgtagccgcatggcgttcgtacttaaatatggaactaaccattccaattttcgctacgaattccg

SEQ ID NO: 213265 - DNA, 80 bp, synthetic construct
  source 1..80: mol_type = other DNA
cggccattcaaacatgaggattacccatgtcgaagacaacaaagaagttcaactctttatgtattgatcttcctcgcgat

SEQ ID NO: 213266 - DNA, 80 bp, synthetic construct
  source 1..80: mol_type = other DNA
actgcgagcttattgttaaggcaatgcaaggtctcctaaaagatggaaacccgattccctcagcaatcgcagcaaactcc

SEQ ID NO: 213267 - DNA, 80 bp, synthetic construct
  source 1..80: mol_type = other DNA
ggcatctactaatagacgccggccattcaaacatgaggattacccatgtcgaagacaacaaagaagttcaactctttatg

SEQ ID NO: 213268 - DNA, 80 bp, synthetic construct
  source 1..80: mol_type = other DNA
gggttacgcggccagatgactccatcttatccccttgaaaacattcttatttgtacgccatagtggcatcgcggttggat

SEQ ID NO: 213269 - DNA, 80 bp, synthetic construct
  source 1..80: mol_type = other DNA
atcaatcgtattggacgcaagcgcgctctactcagtttataagaccgccaactattttcgcaagatcagtgtatttacgc

SEQ ID NO: 213270 - DNA, 80 bp, synthetic construct
  source 1..80: mol_type = other DNA
tgactccagtggtgaaactcctaagatctgtttagctattgcgccgtgcgtttatcaaatcgggcttcccaacattcatt

SEQ ID NO: 213271 - DNA, 80 bp, synthetic construct
  source 1..80: mol_type = other DNA
cttagaaggaagctcgatagttcagagctgcggaaggcccaatttcatattatatgtatgagcctgtcaatacctgcacc

SEQ ID NO: 213272 - DNA, 80 bp, synthetic construct
  source 1..80: mol_type = other DNA
cacgaacaccacagtgactagagtatgagaggtcgacgatctacggatggtgatgagcacggagatctaagcgtggaagt

SEQ ID NO: 213273 - DNA, 80 bp, synthetic construct
  source 1..80: mol_type = other DNA
ggctatatagagcagatatattatatgacgtaccagaggatcacctactaaaagacttttcgagaatctacacctactag

SEQ ID NO: 213274 - DNA, 80 bp, synthetic construct
  source 1..80: mol_type = other DNA
caagggtagccgattagtggatcatctaagacatcaaggctcaaactaattttaccatggacgctgcatttacgcttgca

SEQ ID NO: 213275 - DNA, 80 bp, synthetic construct
  source 1..80: mol_type = other DNA
cattttatgttggcagcctttgccgcggcacatagcgatatcccgtacccgcttttctttaagttaatcgccgatgattg

SEQ ID NO: 213276 - DNA, 80 bp, synthetic construct
  source 1..80: mol_type = other DNA
gctcaataatcgcctcacttgtgcgatgactagccaggcgtttcccgcgtttctagatattatcgcgcttatatagtata

SEQ ID NO: 213277 - DNA, 80 bp, synthetic construct
  source 1..80: mol_type = other DNA
gtactgacgtaaagtcactatttttcgtgcaacgtacgtctcgatgtacaactgctctattacggttcattttttttgta

SEQ ID NO: 213278 - DNA, 80 bp, synthetic construct
  source 1..80: mol_type = other DNA
cggttggcaggtaacgtatggatctttaatataatctaggcaacaagtaagggccattgagcgcttatatgccgcagtct

SEQ ID NO: 213279 - DNA, 80 bp, synthetic construct
  source 1..80: mol_type = other DNA
gacgagtaccctttgttgttattgcagcacccaacagaactaagtaatctttaggctgcggccgcttaggtggcagaaga

SEQ ID NO: 213280 - DNA, 80 bp, synthetic construct
  source 1..80: mol_type = other DNA
tttgctcgatgttctcaagtaaaggacgtcggggagttgacggttggcaggtaacgtatggatctttaatataatctagg
